(19) United States
(12) Patent Application Publication
(10) Pub. No.: US 2008/0286866 A1
(43) Pub. Date: Nov. 20, 2008

(54) NUCLEIC ACID COMPOUNDS FOR INHIBITING VEGF GENE EXPRESSION AND USES THEREOF

(75) Inventors: Steven C. Quay, Woodinville, WA (US); James McSwiggen, Bothell, WA (US); Narendra K. Vaish, Kirkland, WA (US); Mohammad Ahmadian, Bothell, WA (US)

Correspondence Address: NASTECH PHARMACEUTICAL COMPANY INC;MDRNA, Inc., 3830 MONTE VILLA PARKWAY, BOTHELL, WA, 98021-7266, US

(73) Assignee: NASTECH PHARMACEUTICAL COMPANY INC., Bothell, WA (US)

(21) Appl. No.: 12/039,650

(22) Filed: Feb. 28, 2008

Related U.S. Application Data
(60) Provisional application No. 60/934,940, filed on Mar. 2, 2007.
(60) Provisional application No. 60/934,930, filed on Mar. 16, 2007.
(60) Provisional application No. 60/934,943, filed on Apr. 25, 2007.
(60) Provisional application No. 60/934,942, filed on Apr. 25, 2007.
(60) Provisional application No. 60/934,934, filed on Apr. 24, 2007.
(60) Provisional application No. 60/934,928, filed on Apr. 24, 2007.
(60) Provisional application No. 60/934,931, filed on Apr. 20, 2007.

(51) Int. Cl. C12N 5/06; C07H 21/02

(52) U.S. Cl. 435/375; 536/24.5

(57) ABSTRACT

The present disclosure provides meroduplex ribonucleic acid molecules (mdRNA) capable of decreasing or silencing VEGFA, VEGFB, VEGFC, FIGF, or PGF gene expression. An mdRNA of this disclosure comprises at least three strands that combine to form at least two non-overlapping double-stranded regions separated by a nick or gap wherein one strand is complementary to a VEGF mRNA. In addition, the meroduplex may have at least one 5-methyluridine, locked nucleic acid, 2′-O-methyl, or optionally other modifications, and any combination thereof. Also provided are methods of decreasing expression of a VEGF gene in a cell or in a subject to treat a VEGF-related disease.

### CROSS-REFERENCE TO RELATED APPLICATIONS

[0001] The present application claims priority to U.S. Patent Application Nos. 60/934,940, filed Mar. 2, 2007; 60/934,930, filed Mar. 16, 2007; 60/934,931, filed Apr. 20, 2007; 60/934,928, filed Apr. 24, 2007; 60/934,942, filed Apr. 25, 2007; 60/934,943, filed Apr. 25, 2007; and 60/934,934, filed Apr. 24, 2007, each of which is incorporated by reference in its entirety.

### TECHNICAL FIELD

[0002] The present disclosure relates generally to compounds for use in treating disease by gene silencing and, more specifically, to a nicked or gapped double-stranded RNA (dsRNA) comprising at least three strands that decreases expression of a vascular endothelial growth factor (VEGF) gene, and to uses of such dsRNA to treat or prevent hyperproliferative or inflammatory disorders associated with inappropriate VEGF gene expression. The dsRNA that decreases VEGF gene expression may optionally have at least one 5-methyluridine.

### BACKGROUND

[0003] RNA interference (RNAi) refers to the cellular process of sequence specific, post-transcriptional gene silencing in animals mediated by small inhibitory nucleic acid molecules, such as a double-stranded RNA (dsRNA) that is homologous to a portion of a targeted messenger RNA (Fire et al., Nature 391:806, 1998; Hamilton et al., Science 286:950, 1999). RNAi has been observed in a variety of organisms, including mammalians (Fire et al., Nature 391:806, 1998; Bahramian and Zarbl, Mol. Cell. Biol. 19:274-283, 1999; Wianny and Goetz, Nature Cell Biol. 2:70, 1999). RNAi can be induced by introducing an exogenous synthetic 21-nucleotide RNA duplex into cultured mammalian cells (Elbashir et al., Nature 411:494, 2001a).

[0004] The mechanism by which dsRNA mediates targeted gene-silencing can be described as involving two steps. The first step involves degradation of long dsRNAs by a ribonuclease III-like enzyme, referred to as Dicer, into short interfering RNAs (siRNAs) having from 21 to 23 nucleotides with double-stranded regions of about 19 base pairs and a two nucleotide, generally, overhang at each 3′-end (Berstein et al., Nature 409:363, 2001; Elbashir et al., Genes Dev. 15:188, 2001b; and Kim et al., Nature Biotech. 23:222, 2005). The second step of RNAi gene-silencing involves activation of a multi-component nuclease having one strand (guide or antisense strand) from the siRNA and an Argonaute protein to form an RNA-induced silencing complex (“RISC”) (Elbashir et al., Genes Dev. 15:188, 2001). Argonaute initially associates with a double-stranded siRNA and then endonucleolytically cleaves the non-incorporated strand (passenger or sense strand) to facilitate its release due to resulting thermodynamic instability of the cleaved duplex (Leuschner et al., EMBO 7:314, 2006). The guide strand in the activated RISC binds to a complementary target mRNA and cleaves the mRNA to promote gene silencing. Cleavage of the target RNA occurs in the middle of the target region that is complementary to the guide strand (Elbashir et al., 2001b).

[0005] The family of Vascular Endothelial Cell Growth Factors (VEGFs) is, at this time, known to comprise six closely related polypeptides, VEGFA, VEGFB, VEGFC, VEGFD, VEGFE, and placental growth factor (PGF) (see Ferrara, J. Mol. Bio. 77:527, 1999). The VEGFs are pro-angiogenic factors that impact vascular proliferation and/or vascular permeability. The biological activities of each VEGF family member is mediated through one or more of a corresponding family of at least four cell surface localized VEGF receptors (VEGFR), including, VEGFR1, VEGFR2, VEGFR3, NRP1 and NRP2 (Neuropilin receptors 1 and 2, respectively).

[0006] VEGFA driven angiogenesis has a role in the pathogenesis of diverse human disease, including cancer, arthritis, atherosclerosis, diabetic retinopathy, intraocular neovascular disorder, and other conditions (Woolard et al., Cancer Res. 64:7822, 2004). VEGFB has a role in angiogenesis and endothelial cell growth, and has been implicated in cancer such as neuroblastoma. Studies indicate that VEGFC plays an important role in lymphangiogenesis, which is a critical process in the progression of many malignant tumors, including non-small-lung cancer (NSCLC), and there are also data that indicate VEGFC may possess angiogenic properties relating to capillaries. In human tumors and a mouse tumor model, FIGF was capable of promoting tumor angiogenesis, tumor lymphangiogenesis, and metastatic spread (Stacker et al., Nature Med. 7:186, 2001; Achen et al., Growth Factors 20:99, 2002). PGF has been found to affect angiogenesis in disease but not in health, so inhibition of PGF may be useful in inhibiting tumor growth without affecting quiescent vessels. The recognized importance of VEGF in cancer has led to the recent approval of humanized monoclonal antibody, Avastin (bevacizumab), for treating colorectal cancer (Ferrara et al., Nat'l. Rev. Drug Discov. 3:391, 2004), but suffers from the need for high systemic doses. An inhibitor therapeutic directed to VEGFB, VEGFC, FIGF, or PGF has not been approved to date.

### BRIEF SUMMARY

[0007] Briefly, the present disclosure provides nicked or gapped double-stranded RNA (dsRNA) comprising at least three strands that is suitable as a substrate for Dicer or as a RISC activator to modify expression of a vascular endothelial growth factor (VEGF) messenger RNA (mRNA).

[0008] In one aspect, the instant disclosure provides a meroduplex mdRNA molecule, comprising a first strand that is complementary to any one of human VEGF mRNA as set forth in SEQ ID NO:1158, 1159, 1160, 1161, 1162, 1163, or 1164 (i.e., VEGF variants 1 to 7), human VEGFB mRNA as set forth in SEQ ID NO:2289, human VEGFC mRNA as set forth in SEQ ID NO:2398, human FIGF mRNA as set forth in SEQ ID NO:2602, or human PGF mRNA as set forth in SEQ ID NO:2806 or PGF mRNA as set forth in SEQ ID NO:2806, and a second strand and a third strand that are each complementary to non-overlapping regions of the first strand, wherein the second strand and third strands can anneal with the first strand to form at least two double-stranded regions spaced apart by up to 10 nucleotides and thereby forming a gap between the second and third strands, and wherein (a) the mdRNA molecule optionally includes at least one double-stranded region of 5 base pairs to 13 base pairs, or (b) the double-stranded regions combined total about 15 base pairs to about 40 base pairs and the mdRNA molecule optionally has blunt ends. In certain embodiments, the first strand is about 15 to about 40 nucleotides in length, and the second and third strands are each, individually, about 5 to about 20 nucleotides, wherein the combined length of the second and third strands is about 15 nucleotides to about 40 nucleotides. In other embodiments, the first strand is about 15 to about 40 nucleotides in length and is complementary to at least about 15, 19, 20, 21, 22, 23, 24, 25, 26, 27, 28, 29, 30, 35, or 40 contiguous nucleotides of any one of human VEGF mRNA as set forth in SEQ ID NO:1158, 1159, 1160, 1161, 1162, 1163, or 1164 (i.e., VEGF variants 1 to 7), human VEGFB mRNA as set forth in SEQ ID NO:2289, human VEGFC mRNA as set forth in SEQ ID NO:2398, human FIGF mRNA as set forth in SEQ ID NO:2602, or human PGF mRNA as set forth in SEQ ID NO:2806. In still further embodiments, the first strand is about 15 to about 40 nucleotides in length and is at least about 70%, 75%, 80%, 85%, 90%, 95%, 96%, 97%, 98%, or 99% identical to a sequence that is complementary to at least about 15, 19, 20, 21, 22, 23, 24, 25, 26, 27, 28, 29, 30, 35, or 40 contiguous nucleotides of any one of human VEGF mRNA as set forth in SEQ ID NO:1158, 1159, 1160, 1161, 1162, 1163, or 1164 (i.e., VEGF variants 1 to 7), human VEGFB mRNA as set forth in SEQ ID NO:2289, human VEGFC mRNA as set forth in SEQ ID NO:2398, human FIGF mRNA as set forth in SEQ ID NO:2602, or human PGF mRNA as set forth in SEQ ID NO:2806.

[0009] In other embodiments, the mdRNA is a RISC activator (e.g., the first strand has about 15 nucleotides to about 25 nucleotides) or a Dicer substrate (e.g., the first strand has about 26 nucleotides to about 40 nucleotides). In some embodiments, the gap comprises at least one to ten unpaired nucleotides in the first strand positioned between the double-stranded regions formed by the second and third strands when annealed to the first strand, or the gap is a nick. In certain embodiments, the nick or gap is located 10 nucleotides from the 5′-end of the first (antisense) strand or at the Argonaute cleavage site. In another embodiment, the meroduplex nick or gap is positioned such that the thermal stability is maximized for the first and second strand duplex and for the first and third strand duplex as compared to the thermal stability of such meroduplexes having a nick or gap in a different position.

[0010] In another aspect, the instant disclosure provides an mdRNA molecule having a first strand that is complementary to any one of human VEGF mRNA as set forth in SEQ ID NO:1158, 1159, 1160, 1161, 1162, 1163, or 1164 (i.e., VEGF variants 1 to 7), human VEGFB mRNA as set forth in SEQ ID NO:2289, human VEGFC mRNA as set forth in SEQ ID NO:2398, human FIGF mRNA as set forth in SEQ ID NO:2602, or human PGF mRNA as set forth in SEQ ID NO:2806, and a second strand and a third strand that is each complementary to non-overlapping regions of the first strand, wherein the second strand and third strand can anneal with the first strand to form at least two double-stranded regions spaced apart by up to 10 nucleotides and thereby forming a gap between the second and third strands, and wherein (a) the mdRNA molecule optionally includes at least one double-stranded region of 5 base pairs to 13 base pairs, or (b) the double-stranded regions combined total about 15 base pairs to about 40 base pairs and the mdRNA molecule optionally has blunt ends; and wherein at least one pyrimidine of the mdRNA comprises a pyrimidine nucleoside according to Formula I or II:

[chemical structure]

wherein R¹ and R² are each independently a —H, —OH, —OCH₃, —OCH₂OCH₂CH₃, —OCH₂CH₂OCH₃, halogen, substituted or unsubstituted C₁-C₁₀ alkyl, alkoxy, alkoxyalkyl, hydroxyalkyl, carboxyalkyl, alkylsulfonylamino, aminoalkyl, dialkylamino, alkylaminoalkyl, dialkylaminoalkyl, haloalkyl, trifluoromethyl, cycloalkyl, (cycloalkyl)alkyl, substituted or unsubstituted C₂-C₁₀ alkenyl, substituted or unsubstituted —O-allyl, —O—CH₂CH═CH₂, —O—CH═CHCH₃, substituted or unsubstituted C₂-C₁₀ alkynyl, carbamoyl, carbamyl, carboxy, carbonylamino, substituted or unsubstituted aryl, substituted or unsubstituted aralkyl, —NH₂, —NO₂, —C≡N, or heterocyclo group; R³ and R⁴ are each independently a hydroxyl, a protected hydroxyl, a phosphate, or an internucleoside linking group; and R⁵ and R⁸ are independently O or S. In certain embodiments, at least one nucleoside is according to Formula I in which R¹ is methyl and R² is —OH. In certain related embodiments, at least one uridine of the dsRNA molecule is replaced with a nucleoside according to Formula I in which R¹ is methyl and R² is —OH, or R¹ is methyl, R² is —OH, and R⁸ is S. In some embodiments, the at least one R¹ is a C₁-C₅ alkyl, such as methyl. In some embodiments, at least one R² is selected from 2′-O—(C₁-C₅) alkyl, 2′-O-methyl, 2′-OCH₂OCH₂CH₃, 2′-OCH₂CH₂OCH₃, 2′-O-allyl, or fluoro. In some embodiments, at least one pyrimidine nucleoside of the mdRNA molecule is a locked nucleic acid (LNA) in the form of a bicyclic sugar, wherein R² is oxygen, and the 2′-O and 4′-C form an oxymethylene bridge on the same ribose ring (e.g., a 5-methyluridine LNA) or is a G clamp. In other embodiments, one or more of the nucleosides are according to Formula I in which R¹ is methyl and R² is a 2′-O—(C₁-C₅) alkyl, such as 2′-O-methyl. In some embodiments, the gap comprises at least one unpaired nucleotide in the first strand positioned between the double-stranded regions formed by the second and third strands when annealed to the first strand, or the gap is a nick. In certain embodiments, the nick or gap is located 10 nucleotides from the 5′-end of the first strand or at the Argonaute cleavage site. In another embodiment, the meroduplex nick or gap is positioned such that the thermal stability is maximized for the first and second strand duplex and for the first and third strand duplex as compared to the thermal stability of such meroduplexes having a nick or gap in a different position.

[0011] In still another aspect, the instant disclosure provides a method for reducing the expression of a human VEGF gene in a cell, comprising administering an mdRNA molecule to a cell expressing a VEGF gene, wherein the mdRNA molecule is capable of specifically binding to a VEGF mRNA and thereby reducing the gene's level of expression in the cell. In a related aspect, there is provided a method of treating or preventing a disease associated with VEGF expression in a subject by administering an mdRNA molecule of this disclosure.

[0012] In certain embodiments, the cell or subject is human. In certain embodiments, the disease is cancer of one or more of the gastrointestinal tract, pancreas, breast, bladder, kidney, ovary, brain, colon, Kaposi's sarcoma, or squamous cell carcinoma of the head and neck, or leukemia, lymphoma, multiple myeloma, non-small-lung cancer (NSCLC), neuroblastoma, arthritis, atherosclerosis, diabetic retinopathy, or intraocular neovascular disorder.

[0013] In any of the aspects of this disclosure, some embodiments provide an mdRNA molecule having a 5-methyluridine (ribothymidine), a 2-thioribothymidine, or 2′-O-methyl-5-methyluridine in place of at least one uridine on the first, second, or third strand, or in place of each and every uridine on the first, second, or third strand. In further embodiments, the mdRNA further comprises one or more non-standard nucleoside, such as a deoxyuridine, locked nucleic acid (LNA) molecule, or a universal-binding nucleotide, or a G clamp. Exemplary universal-binding nucleotides include C-phenyl, C-naphthyl, inosine, azole carboxamide, 1-β-D-ribofuranosyl-4-nitroindole, 1-β-D-ribofuranosyl-5-nitroindole, 1-β-D-ribofuranosyl-6-nitroindole, or 1-β-D-ribofuranosyl-3-nitropyrrole. In some embodiments, the mdRNA molecule further comprises a 2′-sugar substitution, such as a 2′-O-methyl, 2′-O-methoxyethyl, 2′-O-2-methoxyethyl, 2′-O-allyl, or halogen (e.g., 2′-fluoro). In certain embodiments, the mdRNA molecule further comprises a terminal cap substituent on one or both ends of one or more of the first strand, second strand, or third strand, such as independently an alkyl, abasic, deoxy abasic, glyceryl, dinucleotide, acyclic nucleotide, or inverted deoxynucleotide moiety. In other embodiments, the mdRNA molecule further comprises at least one modified internucleoside linkage, such as independently a phosphorothioate, chiral phosphorothioate, phosphorodithioate, phosphotriester, aminoalkylphosphotriester, methyl phosphonate, alkyl phosphonate, 3′-alkylene phosphonate, 5′-alkylene phosphonate, chiral phosphonate, phosphonoacetate, thiophosphonoacetate, phosphinate, phosphoramidate, 3′-amino phosphoramidate, aminoalkylphosphoramidate, thionophosphoramidate, thionoalkylphosphonate, thionoalkylphosphotriester, selenophosphate, or boranophosphate linkage.

[0014] In any of the aspects of this disclosure, some embodiments provide an mdRNA comprising an overhang of one to four nucleotides on at least one 3′-end that is not part of the gap, such as at least one deoxyribonucleotide or two deoxyribonucleotides (e.g., thymidine). In some embodiments, at least one or two 5′-terminal ribonucleotide of the second strand within the double-stranded region comprises a 2′-sugar substitution. In related embodiments, at least one or two 5′-terminal ribonucleotide of the first strand within the double-stranded region comprises a 2′-sugar substitution. In other related embodiments, at least one or two 5′-terminal ribonucleotide of the second strand and at least one or two 5′-terminal ribonucleotide of the first strand within the double-stranded regions comprise independent 2′-sugar substitutions. In other embodiments, the mdRNA molecule comprises at least three 5-methyluridine within at least one double-stranded region. In some embodiments, the mdRNA molecule has a blunt end at one or both ends. In other embodiments, the 5′-terminal of the third strand is a hydroxyl or a phosphate.

### BRIEF DESCRIPTION OF THE DRAWINGS

[0015] FIG. 1 shows the gene silencing activity of ten different VEGF-specific nicked and gapped dsRNA Dicer substrates. This is the graphical representation of the data found in Table 1 (the Complex numbers on the x-axis correspond to the Set numbers for each of the ten different VEGF dsRNAs shown in Table 1).

[0016] FIG. 2 shows knockdown activity for RISC activator lacZ dsRNA (21 nucleotide sense strand/21 nucleotide antisense strand; 21/21), Dicer substrate lacZ dsRNA (25 nucleotide sense strand/27 nucleotide antisense strand; 25/27), and meroduplex lacZ mdRNA (13 nucleotide sense strand and 11 nucleotide sense strand/27 nucleotide antisense strand; 13, 11/27—the sense strand is missing one nucleotide so that a single nucleotide gap is left between the 13 nucleotide and 11 nucleotide sense strands when annealed to the 27 nucleotide antisense strand. Knockdown activities were normalized to a Qneg control dsRNA and presented as a normalized value of Qneg (i.e., Qneg represents 100% or “normal” gene expression levels). A smaller value indicates a greater knockdown effect.

[0017] FIG. 3 shows knockdown activity of a RISC activator influenza dsRNA G1498 (21/21) and nicked dsRNA (10, 11/21) at 100 nM. The “wt” designation indicates an unsubstituted RNA molecule; “rT” indicates RNA having each uridine substituted with a ribothymidine; and “p” indicates that the 5′-nucleotide of that strand was phosphorylated. The 21 nucleotide sense and antisense strands of G1498 were individually nicked between the nucleotides 10 and 11 as measured from the 5′-end, and is referred to as 11, 10/21 and 21/10, 11, respectively. The G1498 single stranded 21 nucleotide antisense strand alone (designated AS-only) was used as a control.

[0018] FIG. 4 shows knockdown activity of a lacZ dicer substrate (25/27) having a nick in one of each of positions 8 to 14 and a one nucleotide gap at position 13 of the sense strand (counted from the 5′-end). A dideoxy guanosine (ddG) was incorporated at the 5′-end of the 3′-most strand of the nicked or gapped sense sequence at position 13.

[0019] FIG. 5 shows knockdown activity of a dicer substrate influenza dsRNA G1498DS (25/27) and this sequence nicked at one of each of positions 8 to 14 of the sense strand, and shows the activity of these nicked molecules that are also phosphorylated or have a locked nucleic acid substitution.

[0020] FIG. 6 shows a dose dependent knockdown activity a dicer substrate influenza dsRNA G1498DS (25/27) and this sequence nicked at position 13 of the sense strand.

[0021] FIG. 7 shows knockdown activity of a dicer substrate influenza dsRNA G1498DS having a nick or a gap of one to six nucleotides that begins at any one of positions 8 to 12 of the sense strand.

[0022] FIG. 8 shows knockdown activity of a LacZ RISC dsRNA having a nick or a gap of one to six nucleotides that begins at any one of positions 8 to 14 of the sense strand.

[0023] FIG. 9 shows knockdown activity of an influenza RISC dsRNA having a nick at any one of positions 8 to 14 of the sense strand and further having one or two locked nucleic acids (LNA) per sense strand. The inserts on the right side of the graph provides a graphic depiction of the meroduplex structures (for clarity, a single antisense strand is shown at the bottom of the grouping with each of the different nicked sense strands above the antisense) having different nick positions with the relative positioning of the LNAs on the sense strands.

[0024] FIG. 10 shows knockdown activity of a LacZ dicer substrate dsRNA having a nick at any one of positions 8 to 14 of the sense strand as compared to the same nicked dicer substrates but having a locked nucleic acid substitution.

[0025] FIG. 11 shows the percent knockdown in influenza viral titers using influenza specific mdRNA against influenza strain WSN.

[0026] FIG. 12 shows the in vivo reduction in PR8 influenza viral titers using influenza specific mdRNA as measured by TCID₅₀.

### DETAILED DESCRIPTION

[0027] The instant disclosure is predicated upon the unexpected discovery that a nicked or gapped double-stranded RNA (dsRNA) comprising at least three strands is a suitable substrate for Dicer or RISC and, therefore, may be advantageously employed for gene silencing via, for example, the RNA interference pathway. That is, partially duplexed dsRNA molecules described herein (also referred to as meroduplexes having a nick or gap in at least one strand) are capable of initiating an RNA interference cascade that modifies (e.g., reduces) expression of a target messenger RNA (mRNA), such as a human vascular endothelial growth factor (VEGF) mRNA. This is surprising because a person of skill in the art would expect the thermodynamically less stable nicked or gapped dsRNA passenger strand (as compared to an intact dsRNA) to fall apart before any gene silencing effect would result (see, e.g., Leuschner et al., EMBO 7:314, 2006).

[0028] Meroduplex ribonucleic acid (mdRNA) molecules described herein include a first (antisense) strand that is complementary to any one of human VEGF mRNA as set forth in SEQ ID NO:1158, 1159, 1160, 1161, 1162, 1163, or 1164 (i.e., VEGF variants 1 to 7), human VEGFB mRNA as set forth in SEQ ID NO:2289, human VEGFC mRNA as set forth in SEQ ID NO:2398, human FIGF mRNA as set forth in SEQ ID NO:2602, or human PGF mRNA as set forth in SEQ ID NO:2806, along with second and third strands (together forming a gapped sense strand) that are each complementary to non-overlapping regions of the first strand, wherein the second and third strands can anneal with the first strand to form at least two double-stranded regions separated by a gap, and wherein at least one double-stranded region is optionally from about 5 base pairs to about 15 base pairs, or the combined double-stranded regions total about 15 base pairs to about 40 base pairs and the mdRNA is optionally blunt-ended. The gap can be from 0 nucleotides (i.e., a nick in which only a phosphodiester bond between two nucleotides is broken in a polynucleotide molecule) up to about 10 nucleotides (i.e., the first strand will have at least one unpaired nucleotide). In certain embodiments, the nick or gap is located 10 nucleotides from the 5′-end of the first (antisense) strand or at the Argonaute cleavage site. In another embodiment, the meroduplex nick or gap is positioned such that the thermal stability is maximized for the first and second strand duplex and for the first and third strand duplex as compared to the thermal stability of such meroduplexes having a nick or gap in a different position. Also provided herein are methods of using such dsRNA to reduce expression of a VEGF gene in a cell or to treat or prevent diseases or disorders associated with VEGF gene expression, including cancer of one or more of the gastrointestinal tract, pancreas, breast, bladder, kidney, ovary, brain, colon, Kaposi's sarcoma, and squamous cell carcinoma of the head and neck, as well as leukemia, lymphoma, and multiple myeloma, non-small-lung cancer (NSCLC), neuroblastoma, arthritis, atherosclerosis, diabetic retinopathy, and intraocular neovascular disorder.

[0029] Prior to introducing more detail to this disclosure, it may be helpful to an appreciation thereof to provide definitions of certain terms to be used herein.

[0030] In the present description, any concentration range, percentage range, ratio range, or integer range is to be understood to include the value of any integer within the recited range and, when appropriate, fractions thereof (such as one tenth and one hundredth of an integer), unless otherwise indicated. Also, any number range recited herein relating to any physical feature, such as polymer subunits, size or thickness, are to be understood to include any integer within the recited range, unless otherwise indicated. As used herein, “about” or “consisting essentially of” mean ±20% of the indicated range, value, or structure, unless otherwise indicated. As used herein, the terms “include” and “comprise” are open ended and are used synonymously. It should be understood that the terms “a” and “an” as used herein refer to “one or more” of the enumerated components. The use of the alternative (e.g., “or”) should be understood to mean either one, both, or any combination thereof of the alternatives.

[0031] As used herein, the term “isolated” means that the referenced material (e.g., nucleic acid molecules of the instant disclosure), is removed from its original environment, such as being separated from some or all of the co-existing materials in a natural environment (e.g., a natural environment may be a cell).

[0032] As used herein, “complementary” refers to a nucleic acid molecule that can form hydrogen bond(s) with another nucleic acid molecule or itself by either traditional Watson-Crick base pairing or other non-traditional types of pairing (e.g., Hoogsteen or reversed Hoogsteen hydrogen bonding) between complementary nucleosides or nucleotides. In reference to the nucleic molecules of the present disclosure, the binding free energy for a nucleic acid molecule with its complementary sequence is sufficient to allow the relevant function of the nucleic acid molecule to proceed, for example, RNAi activity, and there is a sufficient degree of complementarity to avoid non-specific binding of the nucleic acid molecule (e.g., dsRNA) to non-target sequences under conditions in which specific binding is desired, i.e., under physiological conditions in the case of in vivo assays or therapeutic treatment, or under conditions in which the assays are performed in the case of in vitro assays (e.g., hybridization assays). Determination of binding free energies for nucleic acid molecules is well known in the art (see, e.g., Turner et al., CSH Symp. Quant. Biol. LII:123, 1987; Frier et al., Proc. Nat'l. Acad. Sci. USA 83:9373, 1986; Turner et al., J. Am. Chem. Soc. 109:3783, 1987). Thus, “complementary” or “specifically hybridizable” or “specifically binds” are terms that indicate a sufficient degree of complementarity or precise pairing such that stable and specific binding occurs between a nucleic acid molecule (e.g., dsRNA) and a DNA or RNA target. It is understood in the art that a nucleic acid molecule need not be 100% complementary to a target nucleic acid sequence to be specifically hybridizable or to specifically bind. That is, two or more nucleic acid molecules may be less than fully complementary and is indicated by a percentage of contiguous residues in a nucleic acid molecule that can form hydrogen bonds with a second nucleic acid molecule.

[0033] For example, a first nucleic acid molecule may have 10 nucleotides and a second nucleic acid molecule may have 10 nucleotides, then base pairing of 5, 6, 7, 8, 9, or 10 nucleotides between the first and second nucleic acid molecules, which may or may not form a contiguous double-stranded region, represents 50%, 60%, 70%, 80%, 90%, and 100% complementarity, respectively. In certain embodiments, complementary nucleic acid molecules may have wrongly paired bases—that is, bases that cannot form a traditional Watson-Crick base pair or other non-traditional types of pair (i.e., “mismatched” bases). For instance, complementary nucleic acid molecules may be identified as having a certain number of “mismatches,” such as zero or about 1, about 2, about 3, about 4 or about 5.

[0034] “Perfectly” or “fully” complementary nucleic acid molecules means those in which a certain number of nucleotides of a first nucleic acid molecule hydrogen bond (anneal) with the same number of residues in a second nucleic acid molecule to form a contiguous double-stranded region. For example, two or more fully complementary nucleic acid molecule strands can have the same number of nucleotides (i.e., have the same length and form one double-stranded region, with or without an overhang) or have a different number of nucleotides (e.g., one strand may be shorter than but fully contained within a second strand or one strand may overhang the second strand).

[0035] By “ribonucleic acid” or “RNA” is meant a nucleic acid molecule comprising at least one ribonucleotide molecule. As used herein, “ribonucleotide” refers to a nucleotide with a hydroxyl group at the 2′-position of a β-D-ribofuranose moiety. The term RNA includes double-stranded (ds) RNA, single-stranded (ss) RNA, isolated RNA (such as partially purified RNA, essentially pure RNA, synthetic RNA, recombinantly produced RNA), altered RNA (which differs from naturally occurring RNA by the addition, deletion, substitution or alteration of one or more nucleotides), or any combination thereof. For example, such altered RNA can include addition of non-nucleotide material, such as at one or both ends of an RNA molecule, internally at one or more nucleotides of the RNA, or any combination thereof. Nucleotides in RNA molecules of the instant disclosure can also comprise non-standard nucleotides, such as naturally occurring nucleotides, non-naturally occurring nucleotides, chemically-modified nucleotides, deoxynucleotides, or any combination thereof. These altered RNAs may be referred to as analogs or analogs of RNA containing standard nucleotides (i.e., standard nucleotides, as used herein, are considered to be adenine, cytidine, guanidine, thymidine, and uridine).

[0036] The term “dsRNA” as used herein, which is interchangeable with “mdRNA,” refers to any nucleic acid molecule comprising at least one ribonucleotide molecule and capable of inhibiting or down regulating gene expression, for example, by promoting RNA interference (“RNAi”) or gene silencing in a sequence-specific manner. The dsRNAs (mdRNAs) of the instant disclosure may be suitable substrates for Dicer or for association with RISC to mediate gene silencing by RNAi. Examples of dsRNA molecules of this disclosure are provided in the Sequence Listing identified herein. One or both strands of the dsRNA can further comprise a terminal phosphate group, such as a 5′-phosphate or 5′,3′-diphosphate. As used herein, dsRNA molecules, in addition to at least one ribonucleotide, can further include substitutions, chemically-modified nucleotides, and non-nucleotides. In certain embodiments, dsRNA molecules comprise ribonucleotides up to about 100% of the nucleotide positions.

[0037] In addition, as used herein, the term dsRNA is meant to be equivalent to other terms used to describe nucleic acid molecules that are capable of mediating sequence specific RNAi, for example, meroduplex RNA (mdRNA), nicked dsRNA (ndsRNA), gapped dsRNA (gdsRNA), short interfering nucleic acid (siNA), siRNA, micro-RNA (miRNA), short hairpin RNA (shRNA), short interfering oligonucleotide, short interfering substituted oligonucleotide, short interfering modified oligonucleotide, chemically-modified dsRNA, post-transcriptional gene silencing RNA (ptgsRNA), or the like. The term “large double-stranded RNA” (“large dsRNA”) refers to any double-stranded RNA longer than about 40 base pairs (bp) to about 100 bp or more, particularly up to about 300 bp to about 500 bp. The sequence of a large dsRNA may represent a segment of an mRNA or an entire mRNA. A double-stranded structure may be formed by a self-complementary nucleic acid molecule or by annealing of two or more distinct complementary nucleic acid molecule strands.

[0038] In one aspect, a dsRNA comprises two separate oligonucleotides, comprising a first strand (antisense) and a second strand (sense), wherein the antisense and sense strands are self-complementary (i.e., each strand comprises a nucleotide sequence that is complementary to a nucleotide sequence in the other strand and the two separate strands form a duplex or double-stranded structure, for example, wherein the double-stranded region is about 15 to about 24 base pairs or about 26 to about 40 base pairs); the antisense strand comprises a nucleotide sequence that is complementary to a nucleotide sequence in a target nucleic acid molecule or a portion thereof (e.g., a human VEGF mRNA of SEQ ID NO:1158-1164, 2289, 2398, 2602, or 2806); and the sense strand comprises a nucleotide sequence corresponding (i.e., homologous) to the target nucleic acid sequence or a portion thereof (e.g., a sense strand of about 15 to about 25 nucleotides or about 26 to about 40 nucleotides corresponds to the target nucleic acid or a portion thereof).

[0039] In another aspect, the dsRNA is assembled from a single oligonucleotide in which the self-complementary sense and antisense strands of the dsRNA are linked together by a nucleic acid based-linker or a non-nucleic acid-based linker. In certain embodiments, the first (antisense) and second (sense) strands of the dsRNA molecule are covalently linked by a nucleotide or non-nucleotide linker as described herein and known in the art. In other embodiments, a first dsRNA molecule is covalently linked to at least one second dsRNA molecule by a nucleotide or non-nucleotide linker known in the art, wherein the first dsRNA molecule can be linked to a plurality of other dsRNA molecules that can be the same or different, or any combination thereof. In another embodiment, the linked dsRNA may include a third strand that forms a meroduplex with the linked dsRNA.

[0040] In still another aspect, dsRNA molecules described herein form a meroduplex RNA (mdRNA) having three or more strands such as, for example, an ‘A’ (first or antisense) strand, ‘S1’ (second) strand, and ‘S2’ (third) strand in which the ‘S1’ and ‘S2’ strands are complementary to and form base pairs (bp) with non-overlapping regions of the ‘A’ strand (e.g., an mdRNA can have the form of A:S1S2). The double-stranded region formed by the annealing of the ‘S1’ and ‘A’ strands is distinct from and non-overlapping with the double-stranded region formed by the annealing of the ‘S2’ and ‘A’ strands. An mdRNA molecule is a “gapped” molecule, i.e., it contains a “gap” ranging from 0 nucleotides up to about 10 nucleotides (or a gap of 11, 12, 13, 14, 15, 16, 17, 18, 19, 20, 21, 22, 23, 24, 25, 26, 27, 28, 29, 30, 31, 32, 33, 34 or 35 nucleotides). In one embodiment, the A:S1 duplex is separated from the A:S2 duplex by a gap resulting from at least one unpaired nucleotide (up to about 10 unpaired nucleotides) in the ‘A’ strand that is positioned between the A:S1 duplex and the A:S2 duplex and that is distinct from any one or more unpaired nucleotide at the 3′-end of one or more of the ‘A’, ‘S1’, or ‘S2’ strands. In another embodiment, the A:S1 duplex is separated from the A:S2 duplex by a gap of zero nucleotides (i.e., a nick in which only a phosphodiester bond between two nucleotides is broken or missing in the polynucleotide molecule) between the A:S1 duplex and the A:S2 duplex—which can also be referred to as nicked dsRNA (ndsRNA). For example, A:S1S2 may be comprised of a dsRNA having at least two double-stranded regions that combined total about 14 base pairs to about 40 base pairs and the double-stranded regions are separated by a gap of 0, 1, 2, 3, 4, 5, 6, 7, 8, 9, 10, 11, 12, 13, 14, 15, 16, 17, 18, 19, 20, 21, 22, 23, 24, 25, 26, 27, 28, 29, 30, 31, 32, 33, 34 or 35 nucleotides, optionally having blunt ends, or A:S1S2 may comprise a dsRNA having at least two double-stranded regions spaced apart by up to 10 nucleotides and thereby forming a gap between the second and third strands wherein at least one of the double-stranded regions optionally has from 5 base pairs to 13 base pairs.

[0041] A dsRNA or large dsRNA may include a substitution or modification in which the substitution or modification may be in a phosphate backbone bond, a sugar, a base, or a nucleoside. Such nucleoside substitutions can include natural non-standard nucleosides (e.g., 5-methyluridine or 5-methylcytidine or a 2-thioribothymidine), and such backbone, sugar, or nucleoside modifications can include an alkyl or heteroatom substitution or addition, such as a methyl, alkoxyalkyl, halogen, nitrogen or sulfur, or other modifications known in the art.

[0042] In addition, as used herein, the term “RNAi” is meant to be equivalent to other terms used to describe sequence specific RNA interference, such as post transcriptional gene silencing, translational inhibition, or epigenetics. For example, dsRNA molecules of this disclosure can be used to epigenetically silence genes at the post-transcriptional level or the pre-transcriptional level or any combination thereof.

[0043] As used herein, “target nucleic acid” refers to any nucleic acid sequence whose expression or activity is to be altered (e.g., VEGF). The target nucleic acid can be DNA, RNA, or analogs thereof, and includes single, double, and multi-stranded forms. By “target site” or “target sequence” is meant a sequence within a target nucleic acid (e.g., mRNA) that, when present in an RNA molecule, is “targeted” for cleavage by RNAi and mediated by a dsRNA construct of this disclosure containing a sequence within the antisense strand that is complementary to the target site or sequence.

[0044] As used herein, “off-target effect” or “off-target profile” refers to the observed altered expression pattern of one or more genes in a cell or other biological sample not targeted, directly or indirectly, for gene silencing by an mdRNA or dsRNA. For example, an off-target effect can be quantified by using a DNA microarray to determine how many non-target genes have an expression level altered by about two-fold or more in the presence of a candidate mdRNA or dsRNA, or analog thereof specific for a target sequence, such as a VEGF mRNA. A “minimal off-target effect” means that an mdRNA or dsRNA affects expression by about two-fold or more of about 25% to about 1% of the non-target genes examined or it means that the off-target effect of substituted or modified mdRNA or dsRNA (e.g., having at least one uridine substituted with a 5-methyluridine or 2-thioribothymidine and optionally having at least one nucleotide modified at the 2′-position), is reduced by at least about 1% to about 80% or more as compared to the effect on non-target genes of an unsubstituted or unmodified mdRNA or dsRNA.

[0045] By “sense region” or “sense strand” is meant one or more nucleotide sequences of a dsRNA molecule having complementarity to one or more antisense regions of the dsRNA molecule. In addition, the sense region of a dsRNA molecule comprises a nucleic acid sequence having homology or identity to a target sequence, such as VEGF. By “antisense region” or “antisense strand” is meant a nucleotide sequence of a dsRNA molecule having complementarity to a target nucleic acid sequence, such as VEGF. In addition, the antisense region of a dsRNA molecule can comprise nucleic acid sequence region having complementarity to one or more sense strands of the dsRNA molecule.

[0046] “Analog” as used herein refers to a compound that is structurally similar to a parent compound (e.g., a nucleic acid molecule), but differs slightly in composition (e.g., one atom or functional group is different, added, or removed). The analog may or may not have different chemical or physical properties than the original compound and may or may not have improved biological or chemical activity. For example, the analog may be more hydrophilic or it may have altered activity as compared to a parent compound. The analog may mimic the chemical or biological activity of the parent compound (i.e., it may have similar or identical activity), or, in some cases, may have increased or decreased activity. The analog may be a naturally or non-naturally occurring (e.g., chemically-modified or recombinant) variant of the original compound. An example of an RNA analog is an RNA molecule having a non-standard nucleotide, such as 5-methyuridine or 5-methylcytidine or 2-thioribothymidine, which may impart certain desirable properties (e.g., improve stability, bioavailability, minimize off-target effects or interferon response).

[0047] As used herein, the term “universal base” refers to nucleotide base analogs that form base pairs with each of the standard DNA/RNA bases with little discrimination between them. A universal base is thus interchangeable with all of the standard bases when substituted into a nucleotide duplex (see, e.g., Loakes et al., J. Mol. Bio. 270:426, 1997). Examplary universal bases include C-phenyl, C-naphthyl and other aromatic derivatives, inosine, azole carboxamides, or nitroazole derivatives such as 3-nitropyrrole, 4-nitroindole, 5-nitroindole, and 6-nitroindole (see, e.g., Loakes, Nucleic Acids Res. 29:2437, 2001).

[0048] The term “gene” as used herein, especially in the context of “target gene” or “gene target” for RNAi, means a nucleic acid molecule that encodes an RNA or a transcription product of such gene, including a messenger RNA (mRNA, also referred to as structural genes that encode for a polypeptide), an mRNA splice variant of such gene, a functional RNA (fRNA), or non-coding RNA (ncRNA), such as small temporal RNA (stRNA), microRNA (miRNA), small nuclear RNA (snRNA), short interfering RNA (siRNA), small nucleolar RNA (snRNA), ribosomal RNA (rRNA), transfer RNA (tRNA) and precursor RNAs thereof. Such non-coding RNAs can serve as target nucleic acid molecules for dsRNA mediated RNAi to alter the activity of the target RNA involved in functional or regulatory cellular processes.

[0049] As used herein, “gene silencing” refers to a partial or complete loss-of-function through targeted inhibition of gene expression in a cell, which may also be referred to as RNAi “knockdown,” “inhibition,” “down-regulation,” or “reduction” of expression of a target gene, such as a human VEGF gene. Depending on the circumstances and the biological problem to be addressed, it may be preferable to partially reduce gene expression. Alternatively, it might be desirable to reduce gene expression as much as possible. The extent of silencing may be determined by methods described herein and known in the art (see, e.g., PCT Publication No. WO 99/32619; Elbashir et al., EMBO J. 20:6877, 2001). Depending on the assay, quantification of gene expression permits detection of various amounts of inhibition that may be desired in certain embodiments of this disclosure, including prophylactic and therapeutic methods, which will be capable of knocking down target gene expression, in terms of mRNA level or protein level or activity, for example, by equal to or greater than 10%, 30%, 50%, 75% 90%, 95% or 99% of baseline (i.e., normal) or other control levels, including elevated expression levels as may be associated with particular disease states or other conditions targeted for therapy.

[0050] As used herein, the term “therapeutically effective amount” means an amount of dsRNA that is sufficient to result in a decrease in severity of disease symptoms, an increase in frequency or duration of disease symptom-free periods, or a prevention of impairment or disability due to the disease, in the subject (e.g., human) to which it is administered. For example, a therapeutically effective amount of dsRNA directed against an mRNA of VEGF (e.g., SEQ ID NO:1158-1164, 2289, 2398, 2602, or 2806) can inhibit the deposition of lipoproteins in the walls of arteries by at least about 20%, at least about 40%, at least about 60%, or at least about 80% relative to untreated subjects. A therapeutically effective amount of a therapeutic compound can decrease, for example, atheromatous plaque size or otherwise ameliorate symptoms in a subject. One of ordinary skill in the art would be able to determine such therapeutically effective amounts based on such factors as the subject's size, the severity of symptoms, and the particular composition or route of administration selected. The nucleic acid molecules of the instant disclosure, individually, or in combination or in conjunction with other drugs, can be used to treat diseases or conditions discussed herein. For example, to treat a particular disease, disorder, or condition, the dsRNA molecules can be administered to a patient or can be administered to other appropriate cells evident to those skilled in the art, individually or in combination with one or more drugs, under conditions suitable for treatment.

[0051] In addition, one or more dsRNA may be used to knockdown expression of a VEGF mRNA as set forth in SEQ ID NO:1158-1164, 2289, 2398, 2602, or 2806, or a related mRNA splice variant. In this regard it is noted that a VEGF gene may be transcribed into two or more mRNA splice variants; and thus, for example, in certain embodiments, knockdown of one mRNA splice variant without affecting the other mRNA splice variant may be desired, or vice versa; or knockdown of all transcription products may be targeted.

[0052] In addition, it should be understood that the individual compounds, or groups of compounds, derived from the various combinations of the structures and substituents described herein, are disclosed by the present application to the same extent as if each compound or group of compounds was set forth individually. Thus, selection of particular structures or particular substituents is within the scope of the present disclosure. As described herein, all value ranges are inclusive over the indicated range. Thus, a range of C₁-C₄ will be understood to include the values of 1, 2, 3, and 4, such that C₁, C₂, C₃ and C₄ are included.

[0053] The term “alkyl” as used herein refers to saturated straight- or branched-chain aliphatic groups containing from 1-20 carbon atoms, preferably 1-8 carbon atoms and most preferably 1-4 carbon atoms. This definition applies as well to the alkyl portion of alkoxy, alkanoyl and aralkyl groups. The alkyl group may be substituted or unsubstituted. In certain embodiments, the alkyl is a (C₁-C₄) alkyl or methyl.

[0054] The term “cycloalkyl” as used herein refers to a saturated cyclic hydrocarbon ring system containing from 3 to 12 carbon atoms that may be optionally substituted. Exemplary embodiments include, but are not limited to, cyclopropyl, cyclobutyl, cyclopentyl and cyclohexyl. In certain embodiments, the cycloalkyl group is cyclopropyl. In another embodiment, the (cycloalkyl)alkyl groups contain from 3 to 12 carbon atoms in the cyclic portion and 1 to 6 carbon atoms in the alkyl portion. In certain embodiments, the (cycloalkyl)alkyl group is cyclopropylmethyl. The alkyl groups are optionally substituted with from one to three substituents selected from the group consisting of halogen, hydroxy and amino.

[0055] The terms “alkanoyl” and “alkanoyloxy” as used herein refer, respectively, to —C(O)-alkyl groups and —O—C(═O)— alkyl groups, each optionally containing 2 to 10 carbon atoms. Specific embodiments of alkanoyl and alkanoyloxy groups are acetyl and acetoxy, respectively.

[0056] The term “alkenyl” refers to an unsaturated branched, straight-chain or cyclic alkyl group having 2 to 15 carbon atoms and having at least one carbon-carbon double bond derived by the removal of one hydrogen atom from a single carbon atom of a parent alkene. The group may be in either the cis or trans conformation about the double bond(s). Certain embodiments include ethenyl, 1-propenyl, 2-propenyl, 1-methylethenyl, 1-butenyl, 2-butenyl, 3-butenyl, 2-methyl-2-propenyl, 1-pentenyl, 2-pentenyl, 4-pentenyl, 3-methyl-2-butenyl, 1-hexenyl, 2-hexenyl, 1-heptenyl, 2-heptenyl, 1-octenyl, 2-octenyl, 1,3-octadienyl, 2-nonenyl, 1,3-nonadienyl, 2-decenyl, etc., or the like. The alkenyl group may be substituted or unsubstituted.

[0057] The term “alkynyl” as used herein refers to an unsaturated branched, straight-chain, or cyclic alkyl group having 2 to 10 carbon atoms and having at least one carbon-carbon triple bond derived by the removal of one hydrogen atom from a single carbon atom of a parent alkyne. Exemplary alkynyls include ethynyl, 1-propynyl, 2-propynyl, 1-butynyl, 2-butynyl, 3-butynyl, 1-pentynyl, 2-pentynyl, 4-pentynyl, 1-octynyl, 6-methyl-1-heptynyl, 2-decynyl, or the like. The alkynyl group may be substituted or unsubstituted.

[0058] The term “hydroxyalkyl” alone or in combination, refers to an alkyl group as previously defined, wherein one or several hydrogen atoms, preferably one hydrogen atom has been replaced by a hydroxyl group. Examples include hydroxymethyl, hydroxyethyl and 2-hydroxyethyl.

[0059] The term “aminoalkyl” as used herein refers to the group —NRR′, where R and R′ may independently be hydrogen or (C₁-C₄) alkyl.

[0060] The term “alkylaminoalkyl” refers to an alkylamino group linked via an alkyl group (i.e., a group having the general structure -alkyl-NH-alkyl or -alkyl-N(alkyl)(alkyl)). Such groups include, but are not limited to, mono- and di-(C₁-C₈ alkyl)aminoC₁-C₈ alkyl, in which each alkyl may be the same or different.

[0061] The term “dialkylaminoalkyl” refers to alkylamino groups attached to an alkyl group. Examples include, but are not limited to, N,N-dimethylaminomethyl, N,N-dimethylaminoethyl N,N-dimethylaminopropyl, and the like. The term dialkylaminoalkyl also includes groups where the bridging alkyl moiety is optionally substituted.

[0062] The term “haloalkyl” refers to an alkyl group substituted with one or more halo groups, for example chloromethyl, 2-bromoethyl, 3-iodopropyl, trifluoromethyl, perfluoropropyl, 8-chlorononyl, or the like.

[0063] The term “carboxyalkyl” as used herein refers to the substituent —R¹⁰—COOH, wherein R¹⁰ is alkylene; and “carbalkoxyalkyl” refers to —R¹⁰—C(═O)OR¹¹, wherein R¹⁰ and R¹¹ are alkylene and alkyl respectively. In certain embodiments, alkyl refers to a saturated straight- or branched-chain hydrocarbyl radical of 1 to 6 carbon atoms such as methyl, ethyl, n-propyl, isopropyl, n-butyl, t-butyl, n-pentyl, 2-methylpentyl, n-hexyl, and so forth. Alkylene is the same as alkyl except that the group is divalent.

[0064] The term “alkoxy” includes substituted and unsubstituted alkyl, alkenyl, and alkynyl groups covalently linked to an oxygen atom. In one embodiment, the alkoxy group contains 1 to about 10 carbon atoms. Embodiments of alkoxy groups include, but are not limited to, methoxy, ethoxy, isopropyloxy, propoxy, butoxy, and pentoxy groups. Embodiments of substituted alkoxy groups include halogenated alkoxy groups. In a further embodiment, the alkoxy groups can be substituted with groups such as alkenyl, alkynyl, halogen, hydroxyl, alkylcarbonyloxy, arylcarbonyloxy, alkoxycarbonyloxy, aryloxycarbonyloxy, carboxylate, alkylcarbonyl, arylcarbonyl, alkoxycarbonyl, aminocarbonyl, alkylaminocarbonyl, dialkylaminocarbonyl, alkylthiocarbonyl, alkoxyl, phosphate, phosphonato, phosphinato, cyano, amino (including alkylamino, dialkylamino, arylamino, diarylamino, and alkylarylamino), acylamino (including alkylcarbonylamino, arylcarbonylamino, carbamoyl and ureido), amidino, imino, sulfhydryl, alkylthio, arylthio, thiocarboxylate, sulfates, alkylsulfinyl, sulfonato, sulfamoyl, sulfonamido, nitro, trifluoromethyl, cyano, azido, heterocyclyl, alkylaryl, or an aromatic or heteroaromatic moieties. Exemplary halogen substituted alkoxy groups include, but are not limited to, fluoromethoxy, difluoromethoxy, trifluoromethoxy, chloromethoxy, dichloromethoxy, and trichloromethoxy.

[0065] The term “alkoxyalkyl” refers to an alkylene group substituted with an alkoxy group. For example, methoxyethyl (CH₃OCH₂CH₂—) and ethoxymethyl (CH₃CH₂OCH₂—) are both C₃ alkoxyalkyl groups.

[0066] The term “aryl” as used herein refers to monocyclic or bicyclic aromatic hydrocarbon groups having from 6 to 12 carbon atoms in the ring portion, for example, phenyl, naphthyl, biphenyl and diphenyl groups, each of which may be substituted with, for example, one to four substituents such as alkyl; substituted alkyl as defined above, halogen, trifluoromethyl, trifluoromethoxy, hydroxy, alkoxy, cycloalkyloxy, alkanoyl, alkanoyloxy, amino, alkylamino, dialkylamino, nitro, cyano, carboxy, carboxyalkyl, carbamyl, carbamoyl and aryloxy. Specific embodiments of aryl groups in accordance with the present disclosure include phenyl, substituted phenyl, naphthyl, biphenyl, and diphenyl.

[0067] The term “aroyl,” as used alone or in combination herein, refers to an aryl radical derived from an aromatic carboxylic acid, such as optionally substituted benzoic or naphthoic acids.

[0068] The term “aralkyl” as used herein refers to an aryl group bonded to the 2-pyridinyl ring or the 4-pyridinyl ring through an alkyl group, preferably one containing 1 to 10 carbon atoms. A preferred aralkyl group is benzyl.

[0069] The term “carboxy,” as used herein, represents a group of the formula —C(═O)OH or —C(═O)O⁻.

[0070] The term “carbonyl” as used herein refers to a group in which an oxygen atom is double-bonded to a carbon atom —C═O.

[0071] The term “trifluoromethyl” as used herein refers to —CF₃.

[0072] The term “trifluoromethoxy” as used herein refers to —OCF₃.

[0073] The term “hydroxyl” as used herein refers to —OH or —O⁻.

[0074] The term “nitrile” or “cyano” as used herein refers to the group —CN.

[0075] The term “nitro,” as used herein alone or in combination refers to a —NO₂ group.

[0076] The term “amino” as used herein refers to the group —NR⁹R⁹, wherein R⁹ may independently be hydrogen, alkyl, aryl, alkoxy, or heteroaryl. The term “aminoalkyl” as used herein represents a more detailed selection as compared to “amino” and refers to the group —NR′R′, wherein R′ may independently be hydrogen or (C₁-C₄) alkyl. The term “dialkylamino” refers to an amino group having two attached alkyl groups that can be the same or different.

[0077] The term “alkanoylamino” refers to alkyl, alkenyl or alkynyl groups containing the group —C(═O)— followed by —N(H)—, for example acetylamino, propanoylamino and butanoylamino and the like.

[0078] The term “carbonylamino” refers to the group —NR′—CO—CH₂—R′, wherein R′ may be independently selected from hydrogen or (C₁-C₄) alkyl.

[0079] The term “carbamoyl” as used herein refers to —O—C(O)NH₂.

[0080] The term “carbamyl” as used herein refers to a functional group in which a nitrogen atom is directly bonded to a carbonyl, i.e., as in —NR″C(═O)R″ or —C(═O)NR″R″, wherein R″ can be independently hydrogen, alkyl, substituted alkyl, alkenyl, substituted alkenyl, alkoxy, cycloalkyl, aryl, heterocyclo, or heteroaryl.

[0081] The term “alkylsulfonylamino” refers to the group —NHS(O)₂R¹², wherein R¹² is alkyl.

[0082] The term “halogen” as used herein refers to bromine, chlorine, fluorine or iodine. In one embodiment, the halogen is fluorine. In another embodiment, the halogen is chlorine.

[0083] The term “heterocyclo” refers to an optionally substituted, unsaturated, partially saturated, or fully saturated, aromatic or nonaromatic cyclic group that is a 4 to 7 membered monocyclic, or 7 to 11 membered bicyclic ring system that has at least one heteroatom in at least one carbon atom-containing ring. The substituents on the heterocyclo rings may be selected from those given above for the aryl groups. Each ring of the heterocyclo group containing a heteroatom may have 1, 2, or 3 heteroatoms selected from nitrogen, oxygen or sulfur. Plural heteroatoms in a given heterocyclo ring may be the same or different.

[0084] Exemplary monocyclic heterocyclo groups include pyrrolidinyl, pyrrolyl, indolyl, pyrazolyl, imidazolyl, oxazolyl, isoxazolyl, thiazolyl, furyl, tetrahydrofuryl, thienyl, piperidinyl, piperazinyl, azepinyl, pyrimidinyl, pyridazinyl, tetrahydropyranyl, morpholinyl, dioxanyl, triazinyl and triazolyl. Preferred bicyclic heterocyclo groups include benzothiazolyl, benzoxazolyl, benzothienyl, quinolinyl, tetrahydroisoquinolinyl, benzimidazolyl, benzofuryl, indazolyl, benzisothiazolyl, isoindolinyl and tetrahydroquinolinyl. In more detailed embodiments heterocyclo groups may include indolyl, imidazolyl, furyl, thienyl, thiazolyl, pyrrolidyl, pyridyl and pyrimidyl.

[0085] “Substituted” refers to a group in which one or more hydrogen atoms are each independently replaced with the same or different substituent(s). Representative substituents include —X, —R⁶, —O—, ═O, —OR⁶, —SR⁶, —S—, ═S, —NR⁶R⁶, ═NR⁶, —CX₃, —CF₃, —CN, —OCN, —SCN, —NO, —NO₂, ═N₂, —N₃, —S(═O)₂₋₀—, —S(═O)₂OH, —S(═O)₂R⁶, —OS(═O)₂₋₀—, —OS(═O)₂OH, —OS(═O)₂R⁶, —P(═O)(O—)₂, —P(═O)(OH)(O—), —OP(═O)₂(O⁻), —C(—O)R⁶, —C(═S)R⁶, —C(═O)OR⁶, —C(═O)O—, —C(═S)OR⁶, —NR⁶—C(═O)—N(R⁶)₂, —NR⁶—C(═S)—N(R⁶)₂, and —C(═NR⁶)NR⁶R⁶, wherein each X is independently a halogen; and each R⁶ is independently hydrogen, halogen, alkyl, aryl, arylalkyl, arylaryl, arylheteroalkyl, heteroaryl, heteroarylalkyl, NR⁷R⁷, —C(═O)R⁷, and —S(═O)₂R⁷; and each R⁷ is independently hydrogen, alkyl, alkanyl, alkynyl, aryl, arylalkyl, arylheteralkyl, arylaryl, heteroaryl or heteroarylalkyl. Aryl containing substituents, whether or not having one or more substitutions, may be attached in a para (p-), meta (m-) or ortho (o-) conformation, or any combination thereof.

Vascular Endothelial Growth Factor (VEGF) and Exemplary dsRNA Molecules

[0086] VEGF, also known as vascular endothelial growth factor (VEGFA or VEGF-A), is a pro-angiogenic factor involved in tumor angiogenesis having a variety of functions, including: (a) increasing vascular permeability, which might facilitate tumor dissemination via the circulation causing a greater delivery of oxygen and nutrients; (b) recruiting circulating endothelial precursor cells, and (c) acting as a survival factor for immature tumor blood vessels. VEGF expression or overexpression has been shown to be a mediator of angiogenesis across multiple tumor types, including colorectal, lung, breast and other cancers. VEGFA is expressed as eight different isoforms (VEGF₂₀₆, isoform a; VEGF₁₈₉, isoform b; VEGF₁₈₃, isoform c; VEGF₁₆₅, isoform d; VEGF₁₄₈, isoform e; VEGF₁₂₁, isoform f, VEGF₁₆₅b, isoform g; and VEGF₁₄₅). The VEGF₁₆₅ isoform appears to be the predominant and most potent mitogenic isoform secreted by normal and malignant cells.

[0087] As set forth above, VEGF (also known as vascular permeability factor, VPF, vascular endothelial growth factor, VEGFA, MGC70609) is a potent secreted mitogen critical for physiologic and tumor angiogenesis. More detail regarding VEGF and related disorders are described at www.ncbi.nlm.nih.gov/entrez/query.fcgi?db=OMIM, which is part of the Online Mendelian Inheritance in Man database (OMIM Accession No. 192240). The various human VEGF mRNA sequences have Genbank accession numbers NM_{—}001025366.1 (transcript variant 1; SEQ ID NO:1158); NM_{—}003376.4 (transcript variant 2; SEQ ID NO:1159); NM_{—}001025367.1 (transcript variant 3; SEQ ID NO:1160); NM_{—}001025368.1 (transcript variant 4; SEQ ID NO:1161); NM_{—}001025369.1 (transcript variant 5; SEQ ID NO:1162); NM_{—}001025370.1 (transcript variant 6; SEQ ID NO:1163); and NM_{—}001033756.1 (transcript variant 7; SEQ ID NO:1164). As used herein, reference to a VEGF mRNA or RNA sequence or sense strand means an RNA having a sequence of any VEGF isoform as set forth in SEQ ID NOS:1158, 1159, 1160, 1161, 1162, 1163, and 1164, as well as variants and homologs having at least 80% or more identity with a human VEGF sequence as set forth in SEQ ID NO:1158, 1159, 1160, 1161, 1162, 1163, or 1164.

[0088] The other human VEGF family members are implicated in a variety of diseases and disorders. Expression of VEGFB, VEGFC, FIGF, or PGF has been implicated in a variety of diseases and disorders, including hyperproliferative diseases, angiogenic diseases, lymphangiogenic diseases, and inflammatory disorders. More detail regarding VEGFB (also known as VEGF-related factor, VRF, VEGFL), VEGFC (also known as VEGF-related protein, VRP, Flt-4-L), FIGF (also known as vascular endothelial growth factor D, VEGFD), and PGF (also known as placental growth factor, vascular endothelial growth factor-related protein; PLGF, PlGF; PlGF-2), along with any related disorders are described in the Online Mendelian Inheritance in Man database at www.ncbi.nlm.nih.gov/entrez/query.fcgi?db=OMIM (OMIM Accession Nos. 601398, 601528, 300091, and 601121, respectively). The complete human VEGFB, VEGFC, FIGF, and PGF mRNA sequences have GenBank accession number NM_{—}003377.3 (SEQ ID NO:2289), NM_{—}005429.2 (SEQ ID NO:2398), NM_{—}004469.2 (SEQ ID NO:2602), and NM_{—}002632.4 (SEQ ID NO:2806), respectively. As used herein, reference to VEGFB, VEGFC, FIGF, and PGF mRNAs or RNA sequences or sense strands means an RNA encompassed by SEQ ID NOS:2289, 2398, 2602, and 2806, respectively, as well as variants, isoforms, and homologs having at least 80% or more identity with the human VEGFB, VEGFC, FIGF, and PGF sequence as set forth in SEQ ID NO:2289, 2398, 2602, or 2806, respectively.

[0089] The “percent identity” between two or more nucleic acid sequences is a function of the number of identical positions shared by the sequences (i.e., % identity=number of identical positions/total number of positions×100), taking into account the number of gaps, and the length of each gap that needs to be introduced to optimize alignment of two or more sequences. The comparison of sequences and determination of percent identity between two or more sequences can be accomplished using a mathematical algorithm, such as BLAST and Gapped BLAST programs at their default parameters (e.g., BLASTN, see www.ncbi.nlm.nih.govIBLAST; see also Altschul et al., J. Mol. Biol. 215:403-410, 1990).

[0090] In one aspect, the instant disclosure provides an mdRNA molecule, comprising a first strand that is complementary to VEGF mRNA as set forth in SEQ ID NO:1158-1164, 2289, 2398, 2602, or 2806, and a second strand and a third strand that are each complementary to non-overlapping regions of the first strand, wherein the second strand and third strands can anneal with the first strand to form at least two double-stranded regions spaced apart by up to 10 nucleotides and thereby forming a gap between the second and third strands, and wherein (a) the mdRNA molecule optionally has at least one double-stranded region of about 5 base pairs to 13 base pairs, or (b) wherein the combined double-stranded regions total about 15 base pairs to about 40 base pairs and the mdRNA molecule optionally has blunt ends; wherein at least one pyrimidine of the mdRNA is substituted with a pyrimidine nucleoside according to Formula I or II:

[chemical structure]

wherein R¹ and R² are each independently a —H, —OH, —OCH₃, —OCH₂OCH₂CH₃, —OCH₂CH₂OCH₃, halogen, substituted or unsubstituted C₁-C₁₀ alkyl, alkoxy, alkoxyalkyl, hydroxyalkyl, carboxyalkyl, alkylsulfonylamino, aminoalkyl, dialkylamino, alkylaminoalkyl, dialkylaminoalkyl, haloalkyl, trifluoromethyl, cycloalkyl, (cycloalkyl)alkyl, substituted or unsubstituted C₂-C₁₀ alkenyl, substituted or unsubstituted —O-allyl, —O—CH₂CH═CH₂, —O—CH═CHCH₃, substituted or unsubstituted C₂-C₁₀ alkynyl, carbamoyl, carbamyl, carboxy, carbonylamino, substituted or unsubstituted aryl, substituted or unsubstituted aralkyl, —NH₂, —NO₂, —C≡N, or heterocyclo group; R³ and R⁴ are each independently a hydroxyl, a protected hydroxyl, a phosphate, or an internucleoside linking group; and R⁵ and R⁸ are each independently O or S. In certain embodiments, at least one nucleoside is according to Formula I in which R¹ is methyl and R² is —OH, or R¹ is methyl, R² is —OH, and R⁸ is S. In other embodiments, the internucleoside linking group covalently links from about 5 to about 40 nucleosides. In some embodiments, the gap comprises at least one unpaired nucleotide in the first strand positioned between the double-stranded regions formed by the second and third strands when annealed to the first strand, or the gap is a nick. In certain embodiments, the nick or gap is located 10 nucleotides from the 5′-end of the first (antisense) strand or at the Argonaute cleavage site. In another embodiment, the meroduplex nick or gap is positioned such that the thermal stability is maximized for the first and second strand duplex and for the first and third strand duplex as compared to the thermal stability of such meroduplexes having a nick or gap in a different position.

[0091] In still another aspect, the instant disclosure provides an mdRNA molecule, comprising a first strand that is complementary to vascular endothelial growth factor (VEGF) mRNA as set forth in SEQ ID NO:1158-1164, 2289, 2398, 2602, or 2806, and a second strand and a third strand that are each complementary to non-overlapping regions of the first strand, wherein the second strand and third strands can anneal with the first strand to form at least two double-stranded regions spaced apart by up to 10 nucleotides and thereby forming a gap between the second and third strands, and wherein the mdRNA molecule optionally includes at least one double-stranded region of 5 base pairs to 13 base pairs. In a further aspect, the instant disclosure provides an mdRNA molecule having a first strand that is complementary to a VEGF mRNA as set forth in SEQ ID NO:1158-1164, 2289, 2398, 2602, or 2806, and a second strand and a third strand that are each complementary to non-overlapping regions of the first strand, wherein the second strand and third strands can anneal with the first strand to form at least two double-stranded regions spaced apart by up to 10 nucleotides and thereby forming a gap between the second and third strands, and wherein the combined double-stranded regions total about 15 base pairs to about 40 base pairs and the mdRNA molecule optionally has blunt ends. In some embodiments, the gap comprises at least one unpaired nucleotide in the first strand positioned between the double-stranded regions formed by the second and third strands when annealed to the first strand, or the gap is a nick. In certain embodiments, the nick or gap is located 10 nucleotides from the 5′-end of the first (antisense) strand or at the Argonaute cleavage site. In another embodiment, the meroduplex nick or gap is positioned such that the thermal stability is maximized for the first and second strand duplex and for the first and third strand duplex as compared to the thermal stability of such meroduplexes having a nick or gap in a different position.

[0092] As provided herein, any of the aspects or embodiments disclosed herein would be useful in treating VEGF-associated diseases or disorders, such as cancer of one or more of the gastrointestinal tract, pancreas, breast, bladder, kidney, ovary, brain, colon, Kaposi's sarcoma, and squamous cell carcinoma of the head and neck, as well as leukemia, lymphoma, and multiple myeloma, non-small-lung cancer (NSCLC), neuroblastoma, arthritis, atherosclerosis, diabetic retinopathy, and intraocular neovascular disorder.

[0093] In some embodiments, the dsRNA comprises at least three strands in which the first strand comprises about 5 nucleotides to about 40 nucleotides, and the second and third strands include each, individually, about 5 nucleotides to about 20 nucleotides, wherein the combined length of the second and third strands is about 15 nucleotides to about 40 nucleotides. In other embodiments, the dsRNA comprises at least two strands in which the first strand comprises about 15 nucleotides to about 24 nucleotides or about 25 nucleotides to about 40 nucleotides. In yet other embodiments, the first strand comprises about 15 to about 24 nucleotides or about 25 nucleotides to about 40 nucleotides and is complementary to at least about 15, 19, 20, 21, 22, 23, 24, 25, 26, 27, 28, 29, 30, 35, or 40 contiguous nucleotides of any one of human VEGF mRNA as set forth in SEQ ID NO:1158, 1159, 1160, 1161, 1162, 1163, or 1164 (i.e., VEGF variants 1 to 7), human VEGFB mRNA as set forth in SEQ ID NO:2289, human VEGFC mRNA as set forth in SEQ ID NO:2398, human FIGF mRNA as set forth in SEQ ID NO:2602, or human PGF mRNA as set forth in SEQ ID NO:2806. In alternative embodiments, the first strand comprises about 15 to about 24 nucleotides or about 25 nucleotides to about 40 nucleotides and is at least about 70%, 75%, 80%, 85%, 90%, 95%, 96%, 97%, 98%, or 99% identical to a sequence that is complementary to at least about 15, 19, 20, 21, 22, 23, 24, 25, 26, 27, 28, 29, 30, 35, or 40 contiguous nucleotides of any one of human VEGF mRNA as set forth in SEQ ID NO:1158, 1159, 1160, 1161, 1162, 1163, or 1164 (i.e., VEGF variants 1 to 7), human VEGFB mRNA as set forth in SEQ ID NO:2289, human VEGFC mRNA as set forth in SEQ ID NO:2398, human FIGF mRNA as set forth in SEQ ID NO:2602, or human PGF mRNA as set forth in SEQ ID NO:2806.

[0094] In further embodiments, the first strand will be complementary to a second strand or a second and third strand or to a plurality of strands. The first strand and its complements will be able to form dsRNA and mdRNA molecules of this disclosure, but only about 19 to about 25 nucleotides of the first strand comprise a sequence complementary to a VEGF mRNA. For example, a Dicer substrate dsRNA can have about 25 nucleotides to about 40 nucleotides, but with only 19 nucleotides of the antisense (first) strand being complementary to a VEGF mRNA. In further embodiments, the first strand having complementarity to a VEGF mRNA in about 19 nucleotides to about 25 nucleotides will have one, two, or three mismatches with a VEGF mRNA, such as a sequence set forth in SEQ ID NO:1158-1164, 2289, 2398, 2602, or 2806, or the first strand of 19 nucleotides to about 25 nucleotides, that for example activates or is capable of loading into RISC, will have at least 80% identity with the corresponding nucleotides found in a VEGF mRNA, such as the sequence set forth in SEQ ID NO:1158-1164, 2289, 2398, 2602, or 2806.

[0095] Certain illustrative dsRNA molecules, which can be used to design mdRNA molecules and can optionally include substitutions or modifications as described herein are provided in the Sequence Listings as attached herewith, which is herein incorporated by reference (text file “07-R004PCT_Sequence_Listing,” created Feb. 20, 2008 and having a size of 723 kilobytes). In addition, the content of Table B disclosed in U.S. Provisional Patent Application No. 60/934,930 (filed Mar. 16, 2007), which was submitted with that application as a separate text file named “Table_B_Human-RefSeq_Accession_Numbers.txt” (created Mar. 16, 2007 and having a size of 3,604 kilobytes), is incorporated herein by reference in its entirety.

Substituting and Modifying VEGF dsRNA Molecules

[0096] The introduction of substituted and modified nucleotides into mdRNA and dsRNA molecules of this disclosure provides a powerful tool in overcoming potential limitations of in vivo stability and bioavailability inherent to native RNA molecules (i.e., having standard nucleotides) that are exogenously delivered. For example, the use of dsRNA molecules of this disclosure can enable a lower dose of a particular nucleic acid molecule for a given therapeutic effect (e.g., reducing or silencing VEGF expression) since dsRNA molecules of this disclosure tend to have a longer half-life in serum. Furthermore, certain substitutions and modifications can improve the bioavailability of dsRNA by targeting particular cells or tissues or improving cellular uptake of the dsRNA molecules. Therefore, even if the activity of a dsRNA molecule of this disclosure is reduced as compared to a native RNA molecule, the overall activity of the substituted or modified dsRNA molecule can be greater than that of the native RNA molecule due to improved stability or delivery of the molecule. Unlike native unmodified dsRNA, substituted and modified dsRNA can also minimize the possibility of activating the interferon response in, for example, humans.

[0097] In certain embodiments, a dsRNA molecule of this disclosure has at least one uridine, at least three uridines, or each and every uridine (i.e., all uridines) of the first (antisense) strand of the dsRNA substituted or replaced with 5-methyluridine or 2-thioribothymidine. In a related embodiment, the dsRNA molecule or analog thereof of this disclosure has at least one uridine, at least three uridines, or each and every uridine of the second (sense) strand of the dsRNA substituted or replaced with 5-methyluridine or 2-thioribothymidine. In a related embodiment, the dsRNA molecule or analog thereof of this disclosure has at least one uridine, at least three uridines, or each and every uridine of the third (sense) strand of the dsRNA substituted or replaced with 5-methyluridine or 2-thioribothymidine. In still another embodiment, the dsRNA molecule or analog thereof of this disclosure has at least one uridine, at least three uridines, or each and every uridine of both the first (antisense) and second (sense) strands; of both the first (antisense) and third (sense) strands; of both the second (sense) and third (sense) strands; or of all of the first (antisense), second (sense) and third (sense) strands of the dsRNA substituted or replaced with 5-methyluridine or 2-thioribothymidine. In some embodiments, the double-stranded region of a dsRNA molecule has at least three 5-methyluridines or 2-thioribothymidines. In certain embodiments, dsRNA molecules comprise ribonucleotides at about 5% to about 95% of the nucleotide positions in one strand, both strands, or any combination thereof.

[0098] In further embodiments, a dsRNA molecule that decreases expression of a VEGF gene by RNAi according to the instant disclosure further comprises one or more natural or synthetic non-standard nucleoside. In related embodiments, the non-standard nucleoside is one or more deoxyuridine, locked nucleic acid (LNA) molecule, a modified base (e.g., 5-methyluridine), a universal-binding nucleotide, a 2′-O-methyl nucleotide, a modified internucleoside linkage (e.g., phosphorothioate), a G clamp, or any combination thereof. In certain embodiments, the universal-binding nucleotide can be C-phenyl, C-naphthyl, inosine, azole carboxamide, 1-β-D-ribofuranosyl-4-nitroindole, 1-β-D-ribofuranosyl-5-nitroindole, 1-β-D-ribofuranosyl-6-nitroindole, or 1-β-D-ribofuranosyl-3-nitropyrrole.

[0099] Substituted or modified nucleotides present in dsRNA molecules, preferably in the sense or antisense strand, but also optionally in both the antisense and sense strands, comprise modified or substituted nucleotides according to this disclosure having properties or characteristics similar to natural or standard ribonucleotides. For example, this disclosure features dsRNA molecules including nucleotides having a Northern conformation (e.g., Northern pseudorotation cycle; see, e.g., Saenger, Principles of Nucleic Acid Structure, Springer-Verlag ed., 1984). As such, chemically modified nucleotides present in dsRNA molecules of this disclosure, preferably in the antisense strand, but also optionally in the sense or both the antisense and sense strands, are resistant to nuclease degradation while at the same time maintaining the capacity to mediate RNAi. Exemplary nucleotides having a Northern configuration include locked nucleic acid (LNA) nucleotides (e.g., 2′-O, 4′-C-methylene-(D-ribofuranosyl) nucleotides), 2′-methoxyethyl (MOE) nucleotides, 2′-methyl-thio-ethyl, 2′-deoxy-2′-fluoro nucleotides, 2′-deoxy-2′-chloro nucleotides, 2′-azido nucleotides, 5-methyluridines, or 2′-O-methyl nucleotides. In certain embodiments, the LNA is a 5-methyluridine LNA or 2-thio-5-methyluridine LNA. In any of these embodiments, one or more substituted or modified nucleotides can be a G clamp (e.g., a cytosine analog that forms an additional hydrogen bond to guanine, such as 9-(aminoethoxy)phenoxazine; see, e.g., Lin and Mateucci, J. Am. Chem. Soc. 120:8531, 1998).

[0100] As described herein, the first and one or more second strands of a dsRNA molecule or analog thereof provided by this disclosure can anneal or hybridize together (i.e., due to complementarity between the strands) to form at least one double-stranded region having a length of about 4 to about 10 base pairs, about 5 to about 13 base pairs, or about 15 to about 40 base pairs. In some embodiments, the dsRNA has at least one double-stranded region ranging in length from about 15 to about 24 base pairs or about 19 to about 23 base pairs. In other embodiments, the dsRNA has at least one double-stranded region ranging in length from about 26 to about 40 base pairs or about 27 to about 30 base pairs or about 30 to about 35 base pairs. In other embodiments, the two or more strands of a dsRNA molecule of this disclosure may optionally be covalently linked together by nucleotide or non-nucleotide linker molecules.

[0101] In certain embodiments, the dsRNA molecule or analog thereof comprises an overhang of one to four nucleotides on one or both 3′-ends of the dsRNA, such as an overhang comprising a deoxyribonucleotide or two deoxyribonucleotides (e.g., thymidine, adenine). In certain embodiments, the 3′-end comprising one or more deoxyribonucleotide is in an mdRNA molecule and is either in the gap, not in the gap, or any combination thereof. In some embodiments, dsRNA molecules or analogs thereof have a blunt end at one or both ends of the dsRNA. In certain embodiments, the 5′-end of the first or second strand is phosphorylated. In any of the embodiments of dsRNA molecules described herein, the 3′-terminal nucleotide overhangs can comprise ribonucleotides or deoxyribonucleotides that are chemically-modified at a nucleic acid sugar, base, or backbone. In any of the embodiments of dsRNA molecules described herein, the 3′-terminal nucleotide overhangs can comprise one or more universal base ribonucleotides. In any of the embodiments of dsRNA molecules described herein, the 3′-terminal nucleotide overhangs can comprise one or more acyclic nucleotides. In any of the embodiments of dsRNA molecules described herein, the dsRNA can further comprise a terminal phosphate group, such as a 5′-phosphate (see Martinez et al., Cell 110:563-574, 2002; and Schwarz et al., Molec. Cell 10:537-568, 2002) or a 5′,3′-diphosphate.

[0102] As set forth herein, the terminal structure of dsRNAs of this disclosure that decrease expression of a VEGF gene by, for example, RNAi may either have blunt ends or one or more overhangs. In certain embodiments, the overhang may be at the 3′-end or the 5′-end. The total length of dsRNAs having overhangs is expressed as the sum of the length of the paired double-stranded portion together with the overhanging nucleotides. For example, if a 19 base pair dsRNA has a two nucleotide overhang at both ends, the total length is expressed as 21-mer. Furthermore, since the overhanging sequence may have low specificity to a VEGF gene, it is not necessarily complementary (antisense) or identical (sense) to a VEGF gene sequence. In further embodiments, a dsRNA of this disclosure that decreases expression of a VEGF gene by RNAi may further comprise a low molecular weight structure (e.g., a natural RNA molecule such as a tRNA, rRNA or viral RNA, or an artificial RNA molecule) at, for example, one or more overhanging portion of the dsRNA.

[0103] In further embodiments, a dsRNA molecule that decreases expression of a VEGF gene by RNAi according to the instant disclosure further comprises a 2′-sugar substitution, such as 2′-deoxy, 2′-O-methyl, 2′-O-methoxyethyl, 2′-O-2-methoxyethyl, halogen, 2′-fluoro, 2′-O-allyl, or the like, or any combination thereof. In still further embodiments, a dsRNA molecule that decreases expression of a VEGF gene by RNAi according to the instant disclosure further comprises a terminal cap substituent on one or both ends of the first strand or one or more second strands, such as an alkyl, abasic, deoxy abasic, glyceryl, dinucleotide, acyclic nucleotide, inverted deoxynucleotide moiety, or any combination thereof. In certain embodiments, at least one or two 5′-terminal ribonucleotides of the sense strand within the double-stranded region have a 2′-sugar substitution. In certain other embodiments, at least one or two 5′-terminal ribonucleotides of the antisense strand within the double-stranded region have a 2′-sugar substitution. In certain embodiments, at least one or two 5′-terminal ribonucleotides of the sense strand and the antisense strand within the double-stranded region have a 2′-sugar substitution.

[0104] In other embodiments, a dsRNA molecule that decreases expression of one or more target gene by RNAi according to the instant disclosure comprises one or more substitutions in the sugar backbone, including any combination of ribosyl, 2′-deoxyribosyl, a tetrofuranosyl (e.g., L-α-threofuranosyl), a hexopyranosyl (e.g., β-allopyranosyl, β-altropyranosyl, and β-glucopyranosyl), a pentopyranosyl (e.g., β-ribopyranosyl, α-lyxopyranosyl, β-xylopyranosyl, and α-arabinopyranosyl), a carbocyclic (carbon only ring) analog, a pyranose, a furanose, a morpholino, or analogs or derivatives thereof.

[0105] In yet other embodiments, a dsRNA molecule that decreases expression of a VEGF gene (including a mRNA splice variant thereof) by RNAi according to the instant disclosure further comprises at least one modified internucleoside linkage, such as independently a phosphorothioate, chiral phosphorothioate, phosphorodithioate, phosphotriester, aminoalkylphosphotriester, methyl phosphonate, alkyl phosphonate, 3′-alkylene phosphonate, 5′-alkylene phosphonate, chiral phosphonate, phosphonoacetate, thiophosphonoacetate, phosphinate, phosphoramidate, 3′-amino phosphoramidate, aminoalkylphosphoramidate, thionophosphoramidate, thionoalkylphosphonate, thionoalkylphosphotriester, selenophosphate, boranophosphate linkage, or any combination thereof.

[0106] A modified internucleotide linkage, as described herein, can be present in one or more strands of a dsRNA molecule of this disclosure, for example, in the sense strand, the antisense strand, both strands, or a plurality of strands (e.g., in an mdRNA). The dsRNA molecules of this disclosure can comprise one or more modified internucleotide linkages at the 3′-end, the 5′-end, or both of the 3′- and 5′-ends of the second sense strand, the third sense strand, the antisense strand or any combination of the antisense strand and one or more of the sense strands. In one embodiment, a dsRNA molecule capable of decreasing expression of a VEGF gene (including a specific or selected mRNA splice variant thereof) by RNAi has one modified internucleotide linkage at the 3′-end, such as a phosphorothioate linkage. For example, this disclosure provides a dsRNA molecule capable of decreasing expression of a VEGF gene by RNAi having about 1 to about 8 or more phosphorothioate internucleotide linkages in one dsRNA strand. In yet another embodiment, this disclosure provides a dsRNA molecule capable of decreasing expression of a VEGF gene by RNAi having about 1 to about 8 or more phosphorothioate internucleotide linkages in the dsRNA strands. In other embodiments, an exemplary dsRNA molecule of this disclosure can comprise from about 1 to about 5 or more consecutive phosphorothioate internucleotide linkages at the 5′-end of the sense strand, the antisense strand, both strands, or a plurality of strands. In another example, an exemplary dsRNA molecule of this disclosure can comprise one or more pyrimidine phosphorothioate internucleotide linkages in the sense strand, the antisense strand, either strand, or a plurality of strands. In yet another example, an exemplary dsRNA molecule of this disclosure comprises one or more purine phosphorothioate internucleotide linkages in the sense strand, the antisense strand, either strand, or a plurality of strands.

[0107] Many exemplary modified nucleotide bases or analogs thereof useful in the dsRNA of the instant disclosure include 5-methylcytosine; 5-hydroxymethylcytosine; xanthine; hypoxanthine; 2-aminoadenine; 6-methyl, 2-propyl, or other alkyl derivatives of adenine and guanine; 8-substituted adenines and guanines (such as 8-aza, 8-halo, 8-amino, 8-thiol, 8-thioalkyl, 8-hydroxyl, or the like); 7-methyl, 7-deaza, and 3-deaza adenines and guanines; 2-thiouracil; 2-thiothymine; 2-thiocytosine; 5-methyl, 5-propynyl, 5-halo (such as 5-bromo or 5-fluoro), 5-trifluoromethyl, or other 5-substituted uracils and cytosines; and 6-azouracil. Further useful nucleotide bases can be found in Kurreck, Eur. J. Biochem. 270:1628, 2003; Herdewijn, Antisense Nucleic Acid Develop. 10:297, 2000; Concise Encyclopedia of Polymer Science and Engineering, pages 858-859, Kroschwitz, J. I., ed. John Wiley & Sons, 1990; U.S. Pat. No. 3,687,808, and similar references.

[0108] Certain nucleotide base moieties are particularly useful for increasing the binding affinity of the dsRNA molecules of this disclosure to complementary targets. These include 5-substituted pyrimidines; 6-azapyrimidines; and N-2, N-6, or 0-6 substituted purines (including 2-aminopropyladenine, 5-propynyluracil and 5-propynylcytosine). For example, 5-methyluridine and 5-methylcytosine substitutions are known to increase nucleic acid duplex stability, which can be combined with 2′-sugar modifications (such as 2′-methoxy or 2′-methoxyethyl) or internucleoside linkages (e.g., phosphorothioate) that provide nuclease resistance to the modified or substituted dsRNA.

[0109] In another aspect of the instant disclosure, there is provided a dsRNA that decreases expression of a VEGF gene, comprising a first strand that is complementary to a VEGF mRNA set forth in SEQ ID NO:1158-1164, 2289, 2398, 2602, or 2806 and a second strand that is complementary to the first strand, wherein the first and second strands form a double-stranded region of about 15 to about 40 base pairs; wherein at least one pyrimidine of the dsRNA is substituted with a pyrimidine nucleoside according to Formula I or II:

[chemical structure]

wherein R¹ and R² are each independently a —H, —OH, —OCH₃, —OCH₂OCH₂CH₃, —OCH₂CH₂OCH₃, halogen, substituted or unsubstituted C₁-C₁₀ alkyl, alkoxy, alkoxyalkyl, hydroxyalkyl, carboxyalkyl, alkylsulfonylamino, aminoalkyl, dialkylamino, alkylaminoalkyl, dialkylaminoalkyl, haloalkyl, trifluoromethyl, cycloalkyl, (cycloalkyl)alkyl, substituted or unsubstituted C₂-C₁₀ alkenyl, substituted or unsubstituted —O-allyl, —O—CH₂CH═CH₂, —O—CH═CHCH₃, substituted or unsubstituted C₂-C₁₀ alkynyl, carbamoyl, carbamyl, carboxy, carbonylamino, substituted or unsubstituted aryl, substituted or unsubstituted aralkyl, —NH₂, —NO₂, —C≡N, or heterocyclo group; R³ and R⁴ are each independently a hydroxyl, a protected hydroxyl, or an internucleoside linking group; and R⁵ and R⁸ are each independently O or S. In certain embodiments, at least one nucleoside is according to Formula I in which R¹ is methyl and R² is —OH, or R¹ is methyl, R² is —OH, and R⁸ is S. In other embodiments, the internucleoside linking group covalently links from about 5 to about 40 nucleosides.

[0110] In certain embodiments, the first and one or more second strands of a dsRNA, which decreases expression of a VEGF gene by RNAi and has at least one pyrimidine substituted with a pyrimidine nucleoside according to Formula I or II, can anneal or hybridize together (i.e., due to complementarity between the strands) to form at least one double-stranded region having a length or a combined length of about 15 to about 40 base pairs. In some embodiments, the dsRNA has at least one double-stranded region ranging in length from about 4 base pairs to about 10 base pairs or about 5 to about 13 base pairs or about 15 to about 25 base pairs or about 19 to about 23 base pairs. In other embodiments, the dsRNA has at least one double-stranded region ranging in length from about 26 to about 40 base pairs or about 27 to about 30 base pairs or about 30 to about 35 base pairs. In certain embodiments, the dsRNA molecule or analog thereof has an overhang of one to four nucleotides on one or both 3′-ends, such as an overhang comprising a deoxyribonucleotide or two deoxyribonucleotides (e.g., thymidine). In some embodiments, dsRNA molecule or analog thereof has a blunt end at one or both ends of the dsRNA. In certain embodiments, the 5′-end of the first or second strand is phosphorylated.

[0111] In certain embodiments, at least one R¹ is a C₁-C₅ alkyl, such as methyl or ethyl. Within other exemplary embodiments of this disclosure, compounds of Formula I are a 5-alkyluridine (i.e., R¹ is alkyl, R² is —OH, and R³, R⁴, and R⁵ are as defined herein) or compounds of Formula II are a 5-alkylcytidine (i.e., R¹ is alkyl, R² is —OH, and R³, R⁴, and R⁵ are as defined herein). In related embodiments, the 5-alkyluridine is a 5-methyluridine (also referred to as ribothymidine or T^{r}—i.e., R¹ is methyl and R² is —OH), and the 5-alkylcytidine is a 5-methylcytidine. In other embodiments, at least one, at least three, or all uridines of the first strand of the dsRNA are replaced with 5-methyluridine, or at least one, at least three, or all uridines of the second strand of the dsRNA are replaced with 5-methyluridine, or any combination thereof (e.g., such changes are made on more than one strand). In certain embodiments, at least one pyrimidine nucleoside of Formula I or Formula II has an R⁵ that is S or R⁸ that is S.

[0112] In further embodiments, at least one pyrimidine nucleoside of the dsRNA is a locked nucleic acid (LNA) in the form of a bicyclic sugar, wherein R² is oxygen, and the 2′-O and 4′-C form an oxymethylene bridge on the same ribose ring. In a related embodiment, the LNA comprises a base substitution, such as a 5-methyluridine LNA or 2-thio-5-methyluridine LNA. In other embodiments, at least one, at least three, or all uridines of the first strand of the dsRNA are replaced with 5-methyluridine or 2-thioribothymidine or 5-methyluridine LNA or 2-thio-5-methyluridine LNA, or at least one, at least three, or all uridines of the second strand of the dsRNA are replaced with 5-methyluridine, 2-thioribothymidine, 5-methyluridine LNA, 2-thio-5-methyluridine LNA, or any combination thereof (e.g., such changes are made on both strands, or some substitutions include 5-methyluridine only, 2-thioribothymidine only, 5-methyluridine LNA only, 2-thio-5-methyluridine LNA only, or one or more 5-methyluridine or 2-thioribothymidine with one or more 5-methyluridine LNA or 2-thio-5-methyluridine LNA).

[0113] In further embodiments, a ribose of the pyrimidine nucleoside or the internucleoside linkage can be optionally modified. For example, compounds of Formula I or II are provided wherein R² is alkoxy, such as a 2′-O-methyl substitution (e.g., which may be in addition to a 5-alkyluridine or a 5-alkylcytidine, respectively). In certain embodiments, R² is selected from 2′-O—(C₁-C₅) alkyl, 2′-O-methyl, 2′-OCH₂OCH₂CH₃, 2′-OCH₂CH₂OCH₃, 2′-O-allyl, or 2′-fluoro. In further embodiments, one or more of the pyrimidine nucleosides are according to Formula I in which R¹ is methyl and R² is a 2′-O—(C₁-C₅) alkyl (e.g., 2′-O-methyl), or in which R¹ is methyl, R² is a 2′O—(C₁-C₅) alkyl (e.g., 2′O-methyl), and R² is S, or any combination thereof. In other embodiments, one or more, or at least two, pyrimidine nucleosides according to Formula I or II have an R² that is not —H or —OH and is incorporated at a 3′-end or 5′-end and not within the gap of one or more strands within the double-stranded region of the dsRNA molecule.

[0114] In further embodiments, a dsRNA molecule or analog thereof comprising a pyrimidine nucleoside according to Formula I or Formula II in which R² is not —H or —OH and an overhang, further comprises at least two of pyrimidine nucleosides that are incorporated either at a 3′-end or a 5′-end or both of one strand or two strands within the double-stranded region of the dsRNA molecule. In a related embodiment, at least one of the at least two pyrimidine nucleosides in which R² is not —H or —OH is located at a 3′-end or a 5′-end within the double-stranded region of at least one strand of the dsRNA molecule, and wherein at least one of the at least two pyrimidine nucleosides in which R² is not —H or —OH is located internally within a strand of the dsRNA molecule. In still further embodiments, a dsRNA molecule or analog thereof that has an overhang has a first of the two or more pyrimidine nucleosides in which R² is not —H or —OH that is incorporated at a 5′-end within the double-stranded region of the sense strand of the dsRNA molecule and a second of the two or more pyrimidine nucleosides is incorporated at a 5′-end within the double-stranded region of the antisense strand of the dsRNA molecule. In any of these embodiments, one or more substituted or modified nucleotides can be a G clamp (e.g., a cytosine analog that forms an additional hydrogen bond to guanine, such as 9-(aminoethoxy)phenoxazine; see, e.g., Lin and Mateucci, 1998). In any of these embodiments, provided the one or more pyrimidine nucleosides are not within the gap.

[0115] In yet other embodiments, a dsRNA molecule or analog thereof of Formula I or II according to the instant disclosure that has an overhang that comprises four or more independent pyrimidine nucleosides or four or more independent pyrimidine nucleosides in which R² is not —H or —OH, wherein (a) a first pyrimidine nucleoside is incorporated into a 3′-end within the double-stranded region of the sense (second) strand of the dsRNA, (b) a second pyrimidine nucleoside is incorporated into a 5′-end within the double-stranded region of the sense (second) strand, (c) a third pyrimidine nucleoside is incorporated into a 3′-end within the double-stranded region of the antisense (first) strand of the dsRNA, and (d) a fourth pyrimidine nucleoside is incorporated into a 5′-end within the double-stranded region of the antisense (first) strand. In any of these embodiments, provided the one or more pyrimidine nucleosides are not within the gap.

[0116] In further embodiments, a dsRNA molecule or analog thereof comprising a pyrimidine nucleoside according to Formula I or Formula II in which R¹ is not —H or —OH and is blunt-ended, further comprises at least two of pyrimidine nucleosides that are incorporated either at a 3′-end or a 5′-end or both of one strand or two strands of the dsRNA molecule. In a related embodiment, at least one of the at least two pyrimidine nucleosides in which R² is not —H or —OH is located at a 3′-end or a 5′-end of at least one strand of the dsRNA molecule, and wherein at least one of the at least two pyrimidine nucleosides in which R² is not —H or —OH is located internally within a strand of the dsRNA molecule. In still further embodiments, a dsRNA molecule or analog thereof that is blunt-ended has a first of the two or more pyrimidine nucleosides in which R² is not —H or —OH that is incorporated at a 5′-end of the sense strand of the dsRNA molecule and a second of the two or more pyrimidine nucleosides is incorporated at a 5′-end of the antisense strand of the dsRNA molecule. In any of these embodiments, provided the one or more pyrimidine nucleosides are not within the gap.

[0117] In yet other embodiments, a dsRNA molecule comprising a pyrimidine nucleoside according to Formula I or Formula II and that is blunt-ended comprises four or more independent pyrimidine nucleosides or four or more independent pyrimidine nucleosides in which R² is not —H or —OH, wherein (a) a first pyrimidine nucleoside is incorporated into a 3′-end within the double-stranded region of the sense (second) strand of the dsRNA, (b) a second pyrimidine nucleoside is incorporated into a 5′-end within the double-stranded region of the sense (second) strand, (c) a third pyrimidine nucleoside is incorporated into a 3′-end within the double-stranded region of the antisense (first) strand of the dsRNA, and (d) a fourth pyrimidine nucleoside is incorporated into a 5′-end within the double-stranded region of the antisense (first) strand. In any of these embodiments, provided the one or more pyrimidine nucleosides are not within the gap.

[0118] In still further embodiments, a dsRNA molecule or analog thereof of Formula I or II according to the instant disclosure further comprises a terminal cap substituent on one or both ends of the first strand or second strand, such as an alkyl, abasic, deoxy abasic, glyceryl, dinucleotide, acyclic nucleotide, inverted deoxynucleotide moiety, or any combination thereof. In further embodiments, one or more internucleoside linkage can be optionally modified. For example, a dsRNA molecule or analog thereof of Formula I or II according to the instant disclosure wherein at least one internucleoside linkage is modified to a phosphorothioate, chiral phosphorothioate, phosphorodithioate, phosphotriester, aminoalkylphosphotriester, methyl phosphonate, alkyl phosphonate, 3′-alkylene phosphonate, 5′-alkylene phosphonate, chiral phosphonate, phosphonoacetate, thiophosphonoacetate, phosphinate, phosphoramidate, 3′-amino phosphoramidate, aminoalkylphosphoramidate, thionophosphoramidate, thionoalkylphosphonate, thionoalkylphosphotriester, selenophosphate, boranophosphate linkage, or any combination thereof.

[0119] In still another embodiment, a nicked or gapped dsRNA molecule (ndsRNA or gdsRNA, respectively) that decreases expression of a VEGF gene by RNAi, comprising a first strand that is complementary to a VEGF mRNA set forth in SEQ ID NO:1158-1164, 2289, 2398, 2602, or 2806 and two or more second strands that are complementary to the first strand, wherein the first and at least one of the second strands form a non-overlapping double-stranded region of about 5 to about 13 base pairs. Any of the substitutions or modifications described herein is contemplated within this embodiment as well.

[0120] In another exemplary of this disclosure, the dsRNAs comprise at least two or more substituted pyrimidine nucleosides can each be independently selected wherein R¹ comprises any chemical modification or substitution as contemplated herein, for example an alkyl (e.g., methyl), halogen, hydroxy, alkoxy, nitro, amino, trifluoromethyl, cycloalkyl, (cycloalkyl)alkyl, alkanoyl, alkanoyloxy, aryl, aroyl, aralkyl, nitrile, dialkylamino, alkenyl, alkynyl, hydroxyalkyl, aminoalkyl, alkylaminoalkyl, dialkylaminoalkyl, haloalkyl, carboxyalkyl, alkoxyalkyl, carboxy, carbonyl, alkanoylamino, carbamoyl, carbonylamino, alkylsulfonylamino, or heterocyclo group. When two or more modified ribonucleotides are present, each modified ribonucleotide can be independently modified to have the same, or different, modification or substitution at R¹ or R².

[0121] In other detailed embodiments, one or more substituted pyrimidine nucleosides according to Formula I or II can be located at any ribonucleotide position, or any combination of ribonucleotide positions, on either or both of the sense and antisense strands of a dsRNA molecule of this disclosure, including at one or more multiple terminal positions as noted above, or at any one or combination of multiple non-terminal (“internal”) positions. In this regard, each of the sense and antisense strands can incorporate about 1 to about 6 or more of the substituted pyrimidine nucleosides.

[0122] In certain embodiments, when two or more substituted pyrimidine nucleosides are incorporated within a dsRNA of this disclosure, at least one of the substituted pyrimidine nucleosides will be at a 3′- or 5′-end of one or both strands, and in certain embodiments at least one of the substituted pyrimidine nucleosides will be at a 5′-end of one or both strands. In other embodiments, the substituted pyrimidine nucleosides are located at a position corresponding to a position of a pyrimidine in an unmodified dsRNA that is constructed as a homologous sequence for targeting a cognate mRNA, as described herein.

[0123] In addition, the terminal structure of the dsRNAs of this disclosure may have a stem-loop structure in which ends of one side of the dsRNA molecule are connected by a linker nucleic acid, e.g., a linker RNA. The length of the double-stranded region (stem-loop portion) can be, for example, about 15 to about 49 bp, about 15 to about 35 bp, or about 21 to about 30 bp long. Alternatively, the length of the double-stranded region that is a final transcription product of dsRNAs to be expressed in a target cell may be, for example, approximately about 15 to about 49 bp, about 15 to about 35 bp, or about 21 to about 30 bp long. When linker segments are employed, there is no particular limitation in the length of the linker as long as it does not hinder pairing of the stem portion. For example, for stable pairing of the stem portion and suppression of recombination between DNAs coding for this portion, the linker portion may have a clover-leaf tRNA structure. Even if the linker has a length that would hinder pairing of the stem portion, it is possible, for example, to construct the linker portion to include introns so that the introns are excised during processing of a precursor RNA into mature RNA, thereby allowing pairing of the stem portion. In the case of a stem-loop dsRNA, either end (head or tail) of RNA with no loop structure may have a low molecular weight RNA. As described above, these low molecular weight RNAs may include a natural RNA molecule, such as tRNA, rRNA or viral RNA, or an artificial RNA molecule.

[0124] A dsRNA molecule may be comprised of a circular nucleic acid molecule, wherein the dsRNA is about 38 to about 70 nucleotides in length having from about 18 to about 23 base pairs (e.g., about 19 to about 21 bp) wherein the circular oligonucleotide forms a dumbbell shaped structure having about 19 base pairs and two loops. In certain embodiments, a circular dsRNA molecule contains two loop motifs wherein one or both loop portions of the dsRNA molecule is biodegradable. For example, a circular dsRNA molecule of this disclosure is designed such that degradation of the loop portions of the dsRNA molecule in vivo can generate a dsRNA molecule with 3′-terminal overhangs, such as 3′-terminal nucleotide overhangs comprising from about 1 to about 4 (unpaired) nucleotides.

[0125] Substituting or modifying nucleosides of a dsRNA according to this disclosure can result in increased resistance to enzymatic degradation, such as exonucleolytic degradation, including 5′-exonucleolytic or 3′-exonucleolytic degradation. As such, in some embodiments, the dsRNAs described herein will exhibit significant resistance to enzymatic degradation compared to a corresponding dsRNA having standard nucleotides, and will thereby possess greater stability, increased half-life, and greater bioavailability in physiological environments (e.g., when introduced into a eukaryotic target cell). In addition to increasing resistance of the substituted or modified dsRNAs to exonucleolytic degradation, the incorporation of one or more pyrimidine nucleosides according to Formula I or II will render dsRNAs more resistant to other enzymatic or chemical degradation processes and thus more stable and bioavailable than otherwise identical dsRNAs that do not include the substitutions or modifications. In related aspects of this disclosure, dsRNA substitutions or modifications described herein will often improve stability of a modified dsRNA for use within research, diagnostic and treatment methods wherein the modified dsRNA is contacted with a biological sample, for example, a mammalian cell, intracellular compartment, serum or other extracellular fluid, tissue, or other in vitro or in vivo physiological compartment or environment. In one embodiment, diagnosis is performed on an isolated biological sample. In another embodiment, the diagnostic method is performed in vitro. In a further embodiment, the diagnostic method is not performed (directly) on a human or animal body.

[0126] In addition to increasing stability of substituted or modified dsRNAs, incorporation of one or more pyrimidine nucleosides according to Formula I or II in a dsRNA designed for gene silencing can provide additional desired functional results, including increasing a melting point of a substituted or modified dsRNA compared to a corresponding unmodified dsRNA.

[0127] In another aspect of this disclosure, certain substitutions or modifications of dsRNAs described herein can reduce “off-target effects” of the substituted or modified dsRNA molecules when they are contacted with a biological sample (e.g., when introduced into a target eukaryotic cell having specific, and non-specific mRNA species present as potential specific and non-specific targets). In yet another aspect of this disclosure, the dsRNA substitutions or modifications described herein can reduce interferon activation by the dsRNA molecule when the dsRNA is contacted with a biological sample, e.g., when introduced into a eukaryotic cell.

[0128] In further embodiments, dsRNAs of this disclosure can comprise one or more sense (second) strand that is homologous or corresponds to a sequence of a target gene (e.g., a VEGF) and an antisense (first) strand that is complementary to the sense strand and a sequence of the target gene (e.g., a VEGF). In exemplary embodiments, at least one strand of the dsRNA incorporates one or more pyrimidines substituted according to Formula I or II (e.g., wherein the pyrimidine is one or more 5-methyluridine, 2-thioribothymidine, or 2′-O-methyl-5-methyluridine, the ribose is modified to incorporate one or more 2′-O-methyl substitutions, or any combination thereof). These and other multiple substitutions or modifications according to Formula I or II can be introduced into one or more pyrimidines, or into any combination and up to all pyrimidines present in one or more strands of a dsRNA of the instant disclosure, so long as the dsRNA has RNAi activity similar to or better than the activity of an unmodified dsRNA.

[0129] In any of the embodiments described herein, the dsRNA may include multiple modifications. For example, a dsRNA having at least one ribothymidine or 2-thioribothymidine may further comprise at least one LNA, 2′-methoxy, 2′-fluoro, 2′-deoxy, phosphorothioate linkage, an inverted base terminal cap, or any combination thereof. In certain embodiments, a dsRNA will have from one to all uridines substituted with ribothymidine and have up to about 75% LNA substitutions. In other embodiments, a dsRNA will have from one to all uridines substituted with ribothymidine and have up to about 75% 2′-methoxy substitutions (and not at the Argonaute cleavage site). In still other embodiments, a dsRNA will have from one to all uridines substituted with ribothymidine and have up to about 100% 2′-fluoro substitutions. In further embodiments, a dsRNA will have from one to all uridines substituted with ribothymidine and have up to about 75% 2′-deoxy substitutions. In further embodiments, a dsRNA will have up to about 75% LNA substitutions and have up to about 75% 2′-methoxy substitutions. In still other embodiments, a dsRNA will have up to about 75% LNA substitutions and have up to about 100% 2′-fluoro substitutions. In further embodiments, a dsRNA will have up to about 75% LNA substitutions and have up to about 75% 2′-deoxy substitutions. In further embodiments, a dsRNA will have up to about 75% 2′-methoxy substitutions and have up to about 100% 2′-fluoro substitutions. In further embodiments, a dsRNA will have up to about 75% 2′-methoxy substitutions and have up to about 75% 2′-deoxy substitutions. In further embodiments, a dsRNA will have up to about 100% 2′-fluoro substitutions and have up to about 75% 2′-deoxy substitutions.

[0130] In further multiple modification embodiments, a dsRNA will have from one to all uridines substituted with ribothymidine, up to about 75% LNA substitutions, and up to about 75% 2′-methoxy substitutions. In still further embodiments, a dsRNA will have from one to all uridines substituted with ribothymidine, up to about 75% LNA substitutions, and up to about 100% 2′-fluoro substitutions. In further embodiments, a dsRNA will have from one to all uridines substituted with ribothymidine, up to about 75% LNA substitutions, and up to about 75% 2′-deoxy substitutions. In further embodiments, a dsRNA will have from one to all uridines substituted with ribothymidine, up to about 75% 2′-methoxy substitutions, and up to about 75% 2′-fluoro substitutions. In further embodiments, a dsRNA will have from one to all uridines substituted with ribothymidine, up to about 75% 2′-methoxy substitutions, and up to about 75% 2′-deoxy substitutions. In further embodiments, a dsRNA will have from one to all uridines substituted with ribothymidine, up to about 100% 2′-fluoro substitutions, and up to about 75% 2′-deoxy substitutions. In yet further embodiments, a dsRNA will have from one to all uridines substituted with ribothymidine, up to about 75% LNA substitutions, up to about 75% 2′-methoxy, up to about 100% 2′-fluoro, and up to about 75% 2′-deoxy substitutions. In other embodiments, a dsRNA will have up to about 75% LNA substitutions, up to about 75% 2′-methoxy substitutions, and up to about 100% 2′-fluoro substitutions. In further embodiments, a dsRNA will have up to about 75% LNA substitutions, up to about 75% 2′-methoxy substitutions, and up to about 75% 2′-deoxy substitutions. In further embodiments, a dsRNA will have up to about 75% LNA substitutions, up to about 100% 2′-fluoro substitutions, and up to about 75% 2′-deoxy substitutions. In still further embodiments, a dsRNA will have up to about 75% 2′-methoxy, up to about 100% 2′-fluoro, and up to about 75% 2′-deoxy substitutions.

[0131] In any of these multiple modification embodiments, the dsRNA may further comprise up to 100% phosphorothioate internucleoside linkages, from one to ten or more inverted base terminal caps, or any combination thereof. Additionally, any of these multiple modification embodiments may have these multiple modifications on one strand, two strands, three strands, a plurality of strands, or all strands. Finally, in any of these multiple modification dsRNA, the dsRNA must have gene silencing activity.

[0132] Within certain aspects, the present disclosure provides dsRNA that decreases expression of a VEGF gene by RNAi (e.g., a VEGF of SEQ ID NO:1158-1164, 2289, 2398, 2602, or 2806), and compositions comprising one or more dsRNA, wherein at least one dsRNA comprises one or more universal-binding nucleotide(s) in the first, second or third position in the anti-codon of the antisense or sense strand of the dsRNA and wherein the dsRNA is capable of specifically binding to a VEGF sequence, such as an RNA expressed by a target cell. In cases wherein the sequence of a target VEGF RNA includes one or more single nucleotide substitutions, dsRNA comprising a universal-binding nucleotide retains its capacity to specifically bind a target VEGF RNA, thereby mediating gene silencing and, as a consequence, overcoming escape of the target VEGF from dsRNA-mediated gene silencing. Examplary universal-binding nucleotides that may be suitably employed in the compositions and methods disclosed herein include inosine, 1-β-D-ribofuranosyl-5-nitroindole, or 1-β-D-ribofuranosyl-3-nitropyrrole.

[0133] In certain aspects, dsRNA disclosed herein can include between about 1 universal-binding nucleotide and about 10 universal-binding nucleotides. Within other aspects, the presently disclosed dsRNA may comprise a sense strand that is homologous to a sequence of a VEGF gene and an antisense strand that is complementary to the sense strand, with the proviso that at least one nucleotide of the antisense or sense strand of the otherwise complementary dsRNA duplex has one or more universal-binding nucleotide.

### Synthesis of Nucleic Acid Molecules

[0134] Exemplary molecules of the instant disclosure are recombinantly produced, chemically synthesized, or a combination thereof. Oligonucleotides (e.g., certain modified oligonucleotides or portions of oligonucleotides lacking ribonucleotides) are synthesized using protocols known in the art, for example as described in Caruthers et al., Methods in Enzymol. 211:3, 1992; Thompson et al., PCT Publication No. WO 99/54459, Wincott et al., Nucleic Acids Res. 23:2677-2684, 1995; Wincott et al., Methods Mol. Bio. 74:59, 1997; Brennan et al., Biotechnol Bioeng. 61:33, 1998; and Brennan, U.S. Pat. No. 6,001,311. Synthesis of RNA, including certain dsRNA molecules and analogs thereof of this disclosure, can be made using the procedure as described in Usman et al., J. Am. Chem. Soc. 109:7845, 1987; Scaringe et al., Nucleic Acids Res. 18:5433, 1990; and Wincott et al., Nucleic Acids Res. 23:2677, 1995; Wincott et al., Methods Mol. Bio. 74:59, 1997.

[0135] In certain embodiments, the nucleic acid molecules of the present disclosure can be synthesized separately and joined together post-synthetically, for example, by ligation (Moore et al., Science 256:9923, 1992; Draper et al., PCT Publication No. WO 93/23569; Shabarova et al., Nucleic Acids Res. 19:4247, 1991; Bellon et al., Nucleosides & Nucleotides 16:951, 1997; Bellon et al., Bioconjugate Chem. 8:204, 1997), or by hybridization following synthesis or deprotection.

[0136] In further embodiments, dsRNAs of this disclosure that decrease expression of a VEGF gene by RNAi can be made as single or multiple transcription products expressed by a polynucleotide vector encoding one or more dsRNAs and directing their expression within host cells. In these embodiments the double-stranded portion of a final transcription product of the dsRNAs to be expressed within the target cell can be, for example, about 5 to about 40 bp, about 15 to about 24 bp, or about 25 to about 40 bp long. Within exemplary embodiments, double-stranded portions of dsRNAs, in which two or more strands pair up, are not limited to completely paired nucleotide segments, and may contain non-pairing portions due to a mismatch (the corresponding nucleotides are not complementary), bulge (lacking in the corresponding complementary nucleotide on one strand), overhang, or the like. Non-pairing portions can be contained to the extent that they do not interfere with dsRNA formation and function. In certain embodiments, a “bulge” may comprise 1 to 2 non-pairing nucleotides, and the double-stranded region of dsRNAs in which two strands pair up may contain from about 1 to 7, or about 1 to 5 bulges. In addition, “mismatch” portions contained in the double-stranded region of dsRNAs may include from about 1 to 7, or about 1 to 5 mismatches. In other embodiments, the double-stranded region of dsRNAs of this disclosure may contain both bulge and mismatched portions in the approximate numerical ranges specified herein.

[0137] A dsRNA or analog thereof of this disclosure may be further comprised of a nucleotide, non-nucleotide, or mixed nucleotide/non-nucleotide linker that joins the sense region of the dsRNA to the antisense region of the dsRNA. In one embodiment, a nucleotide linker can be a linker of more than about 2 nucleotides length up to about 10 nucleotides in length. In another embodiment, the nucleotide linker can be a nucleic acid aptamer. By “aptamer” or “nucleic acid aptamer” as used herein is meant a nucleic acid molecule that binds specifically to a target molecule wherein the nucleic acid molecule has sequence that comprises a sequence recognized by the target molecule in its natural setting. Alternately, an aptamer can be a nucleic acid molecule that binds to a target molecule wherein the target molecule does not naturally bind to a nucleic acid. The target molecule can be any molecule of interest. For example, the aptamer can be used to bind to a ligand-binding domain of a protein, thereby preventing interaction of the naturally occurring ligand with the protein. This is a non-limiting example and those in the art will recognize that other embodiments can be readily generated using techniques generally known in the art (see, e.g., Gold et al., Annu. Rev. Biochem. 64:763, 1995; Brody and Gold, J. Biotechnol. 74:5, 2000; Sun, Curr. Opin. Mol. Ther. 2:100, 2000; Kusser, J. Biotechnol. 74:27, 2000; Hermann and Patel, Science 287:820, 2000; and Jayasena, Clinical Chem. 45:1628, 1999).

[0138] A non-nucleotide linker may be comprised of an abasic nucleotide, polyether, polyamine, polyamide, peptide, carbohydrate, lipid, polyhydrocarbon, or other polymeric compounds (e.g., polyethylene glycols such as those having between 2 and 100 ethylene glycol units). Specific examples include those described by Seela and Kaiser, Nucleic Acids Res. 18:6353, 1990, and Nucleic Acids Res. 15:3113, 1987; Cload and Schepartz, J. Am. Chem. Soc. 113:6324, 1991; Richardson and Schepartz, J. Am. Chem. Soc. 113:5109, 1991; Ma et al., Nucleic Acids Res. 21:2585, 1993, and Biochemistry 32:1751, 1993; Durand et al., Nucleic Acids Res. 18:6353, 1990; McCurdy et al., Nucleosides & Nucleotides 10:287, 1991; Jaschke et al., Tetrahedron Lett. 34:301, 1993; Ono et al., Biochemistry 30:9914, 1991; Arnold et al., PCT Publication No. WO 89/02439; Usman et al., PCT Publication No. WO 95/06731; Dudycz et al., PCT Publication No. WO 95/11910 and Ferentz and Verdine, J. Am. Chem. Soc. 113:4000, 1991. The synthesis of a dsRNA molecule of this disclosure, which can be further modified, comprises: (a) synthesis of a first (antisense) strand and synthesis of a second (sense) strand and a third (sense) strand that are each complementary to non-overlapping regions of the first strand; and (b) annealing the first, second and third strands together under conditions suitable to obtain a dsRNA molecule. In another embodiment, synthesis of the first, second and thirdstrands of a dsRNA molecule is by solid phase oligonucleotide synthesis. In yet another embodiment, synthesis of the first, second, and third strands of a dsRNA molecule is by solid phase tandem oligonucleotide synthesis.

[0139] Chemically synthesizing nucleic acid molecules with substitutions or modifications (base, sugar, phosphate, or any combination thereof) can prevent their degradation by serum ribonucleases, which may lead to increased potency. See, e.g., Eckstein et al., PCT Publication No. WO 92/07065; Perrault et al., Nature 344:565, 1990; Pieken et al., Science 253:314, 1991; Usman and Cedergren, Trends in Biochem. Sci. 17:334, 1992; Usman et al., Nucleic Acids Symp. Ser. 31:163, 1994; Beigelman et al., J. Biol. Chem. 270:25702, 1995; Burgin et al., Biochemistry 35:14090, 1996; Burlina et al, Bioorg. Med. Chem. 5:1999, 1997; Thompson et al., Karpeisky et al., Tetrahedron Lett. 39:1131, 1998; Earnshaw and Gait, Biopolymers (Nucleic Acid Sciences) 48:39-55, 1998; Verma and Eckstein, Annu. Rev. Biochem. 67:99-134, 1998; Herdewijn, Antisense Nucleic Acid Drug Dev. 10:297, 2000; Kurreck, Eur. J. Biochem. 270:1628, 2003; Dorsett and Tuschl, Nature Rev. Drug Discov. 3:318, 2004; Rossi et al., PCT Publication No. WO 91/03162; Usman et al., PCT Publication No. WO 93/15187; Beigelman et al., PCT Publication No. WO 97/26270; Woolf et al., PCT Publication No. WO 98/13526; Sproat, U.S. Pat. No. 5,334,711; Usman et al., U.S. Pat. No. 5,627,053; Beigelman et al., U.S. Pat. No. 5,716,824; Ötvös et al., U.S. Pat. No. 5,767,264; Gold et al., U.S. Pat. No. 6,300,074. Each of the above references discloses various substitutions and chemical modifications to the base, phosphate, or sugar moieties of nucleic acid molecules, which can be used in the dsRNAs described herein. For example, oligonucleotides can be modified at the sugar moiety to enhance stability or prolong biological activity by increasing nuclease resistance. Representative sugar modifications include 2′-amino, 2′-C-allyl, 2′-fluoro, 2′-O-methyl, 2′-O-allyl, or 2′-H. Other modifications to enhance stability or prolong biological activity can be internucleoside linkages, such as phosphorothioate, or base-modifications, such as locked nucleic acids (see, e.g., U.S. Pat. Nos. 6,670,461; 6,794,499; 6,268,490), or 5-methyluridine or 2′-O-methyl-5-methyluridine in place of uridine (see, e.g., U.S. Patent Application Publication No. 2006/0142230). Hence, dsRNA molecules of the instant disclosure can be modified to increase nuclease resistance or duplex stability while substantially retaining or having enhanced RNAi activity as compared to unmodified dsRNA.

[0140] In one embodiment, this disclosure features substituted or modified dsRNA molecules, such as phosphate backbone modifications comprising one or more phosphorothioate, phosphorodithioate, methylphosphonate, phosphotriester, morpholino, amidate carbamate, carboxymethyl, acetamidate, polyamide, sulfonate, sulfonamide, sulfamate, formacetal, thioformacetal, or alkylsilyl substitutions. For a review of oligonucleotide backbone modifications, see Hunziker and Leumann, Nucleic Acid Analogues: Synthesis and Properties, in Modern Synthetic Methods, VCH, 331-417, 1995; and Mesmaeker et al., ACS, 24-39, 1994.

[0141] In another embodiment, a conjugate molecule can be optionally attached to a dsRNA or analog thereof that decreases expression of a VEGF gene by RNAi. For example, such conjugate molecules may be polyethylene glycol, human serum albumin, polyarginine, Gln-Asn polymer, or a ligand for a cellular receptor that can, for example, mediate cellular uptake (e.g., HIV TAT, see Vocero-Akbani et al., Nature Med. 5:23, 1999; see also U.S. Patent Application Publication No. 2004/0132161). Examples of specific conjugate molecules contemplated by the instant disclosure that can be attached to a dsRNA or analog thereof of this disclosure are described in Vargeese et al., U.S. Patent Application Publication No. 2003/0130186, and U.S. Patent Application Publication No. 2004/0110296. In another embodiment, a conjugate molecule is covalently attached to a dsRNA or analog thereof that decreases expression of a VEGF gene by RNAi via a biodegradable linker. In certain embodiments, a conjugate molecule can be attached at the 3′-end of either the sense strand, the antisense strand, or both strands of a dsRNA molecule provided herein. In another embodiment, a conjugate molecule can be attached at the 5′-end of either the sense strand, the antisense strand, or both strands of the dsRNA or analog thereof. In yet another embodiment, a conjugate molecule is attached at both the 3′-end and 5′-end of either the sense strand, the antisense strand, or both strands of a dsRNA molecule, or any combination thereof. In further embodiments, a conjugate molecule of this disclosure comprises a molecule that facilitates delivery of a dsRNA or analog thereof into a biological system, such as a cell. A person of skill in the art can screen dsRNA of this disclosure having various conjugates to determine whether the dsRNA-conjugate possesses improved properties (e.g., pharmacokinetic profiles, bioavailability, stability) while maintaining the ability to mediate RNAi in, for example, an animal model as described herein or generally known in the art.

Methods for Selecting dsRNA Molecules Specific for VEGF

[0142] As indicated herein, the present disclosure also provides methods for selecting dsRNA and analogs thereof that are capable of specifically binding to a VEGF gene (including a mRNA splice variant thereof) while being incapable of specifically binding or minimally binding to non-VEGF genes. The selection process disclosed herein is useful, for example, in eliminating dsRNAs analogs that are cytotoxic due to non-specific binding to, and subsequent degradation of, one or more non-VEGF genes.

[0143] Methods of the present disclosure do not require a priori knowledge of the nucleotide sequence of every possible gene variant (including mRNA splice variants) targeted by the dsRNA or analog thereof. In one embodiment, the nucleotide sequence of the dsRNA is selected from a conserved region or consensus sequence of a VEGF gene. In another embodiment, the nucleotide sequence of the dsRNA may be selectively or preferentially targeted to a certain sequence contained in an mRNA splice variant of a VEGF gene.

[0144] In certain embodiments, methods are provided for selecting one or more dsRNA molecule that decreases expression of a VEGF gene by RNAi, comprising a first strand that is complementary to a VEGF mRNA set forth in SEQ ID NO:1158-1164, 2289, 2398, 2602, or 2806 and a second strand that is complementary to the first strand, wherein the first and second strands form a double-stranded region of about 15 to about 40 base pairs (see, e.g., VEGF sequences in the Sequence Listing identified herein), and wherein at least one uridine of the dsRNA molecule is replaced with a 5-methyluridine or 2-thioribothymidine or 2′-O-methyl-5-methyluridine, which methods employ “off-target” profiling whereby one or more dsRNA provided herein is contacted with a cell, either in vivo or in vitro, and total mRNA is collected for use in probing a microarray comprising oligonucleotides having one or more nucleotide sequence from a panel of known genes, including non-VEGF genes (e.g., interferon). Within related embodiments, one or more dsRNA molecule that decreases expressioni of a VEGF gene by RNAi may further comprise a third strand that is complementary to the first strand, wherein the first and third strands form a double-stranded region wherein the double-stranded region formed by the first and third strands is non-overlapping with a double-stranded region formed by the first and second strands. The “off-target” profile of the dsRNA provided herein is quantified by determining the number of non-VEGF genes having reduced expression levels in the presence of the candidate dsRNAs. The existence of “off target” binding indicates a dsRNA is capable of specifically binding to one or more non-VEGF gene messages. In certain embodiments, a dsRNA as provided herein (see, e.g., sequences in the Sequence Listing identified herein) applicable to therapeutic use will exhibit a greater stability, minimal interferon response, and little or no “off-target” binding.

[0145] Still further embodiments provide methods for selecting more efficacious dsRNA by using one or more reporter gene constructs comprising a constitutive promoter, such as a cytomegalovirus (CMV) or phosphoglycerate kinase (PGK) promoter, operably fused to, and capable of altering the expression of one or more reporter genes, such as a luciferase, chloramphenicol (CAT), or β-galactosidase, which, in turn, is operably fused in-frame with a dsRNA (such as one having a length between about 15 base-pairs and about 40 base-pairs or from about 5 nucleotides to about 24 nucleotides, or about 25 nucleotides to about 40 nucleotides) that contains a VEGF sequence, as provided herein.

[0146] Individual reporter gene expression constructs may be co-transfected with one or more dsRNA or analog thereof. The capacity of a given dsRNA to reduce the expression level of VEGF may be determined by comparing the measured reporter gene activity in cells transfected with or without a dsRNA molecule of interest.

[0147] Certain embodiments disclosed herein provide methods for selecting one or more modified dsRNA molecule(s) that employ the step of predicting the stability of a dsRNA duplex. In some embodiments, such a prediction is achieved by employing a theoretical melting curve wherein a higher theoretical melting curve indicates an increase in dsRNA duplex stability and a concomitant decrease in cytotoxic effects. Alternatively, stability of a dsRNA duplex may be determined empirically by measuring the hybridization of a single RNA analog strand as described herein to a complementary target gene within, for example, a polynucleotide array. The melting temperature (i.e., the Tₘ value) for each modified RNA and complementary RNA immobilized on the array can be determined and, from this Tₘ value, the relative stability of the modified RNA pairing with a complementary RNA molecule determined.

[0148] For example, Kawase et al. (Nucleic Acids Res. 14:7727, 1986) have described an analysis of the nucleotide-pairing properties of Di (inosine) to A, C, G, and T, which was achieved by measuring the hybridization of oligonucleotides (ODNs) with Di in various positions to complementary sets of ODNs made as an array. The relative strength of nucleotide-pairing is I-C>I-A>I-G≈I-T. Generally, Di containing duplexes showed lower Tₘ values when compared to the corresponding wild type (WT) nucleotide pair. The stabilization of Di by pairing was in order of Dc>Da>Dg>Dt>Du. As a person of skill in the art would understand, although universal-binding nucleotides are used herein as an example of determining duplex stability (i.e., the Tₘ value), other nucleotide substitutions (e.g., 5-methyluridine for uridine) or further modifications (e.g., a ribose modification at the 2′-position) can also be evaluated by these or similar methods.

[0149] In still further embodiments of the presently disclosed methods, one or more anti-codon within an antisense strand of a dsRNA molecule or analog thereof is substituted with a universal-binding nucleotide in a second or third position in the anti-codon of the antisense strand. By substituting a universal-binding nucleotide for a first or second position, the one or more first or second position nucleotide-pair substitution allows the substituted dsRNA molecule to specifically bind to mRNA wherein a first or a second position nucleotide-pair substitution has occurred, wherein the one or more nucleotide-pair substitution results in an amino acid change in the corresponding gene product.

[0150] Any of these methods of identifying dsRNA of interest can also be used to examine a dsRNA that decreases expression of a VEGF gene by RNA interference, comprising a first strand that is complementary to a human VEGF mRNA as set forth in SEQ ID NO:1158, 1159, 1160, 1161, 1162, 1163, or 1164 (i.e., VEGF variants 1 to 7), human VEGFB mRNA as set forth in SEQ ID NO:2289, human VEGFC mRNA as set forth in SEQ ID NO:2398, human FIGF mRNA as set forth in SEQ ID NO:2602, or human PGF mRNA as set forth in SEQ ID NO:2806 or PGF mRNA as set forth in SEQ ID NO:2806, and a second and third strand that have non-overlapping complementarity to the first strand, wherein the first and at least one of the second or third strand optionally form a double-stranded region of 5 to about 13 base pairs; wherein at least one pyrimidine of the dsRNA comprises a pyrimidine nucleoside according to Formula I or II:

[chemical structure]

wherein R¹ and R² are each independently a —H, —OH, —OCH₃, —OCH₂OCH₂CH₃, —OCH₂CH₂OCH₃, halogen, substituted or unsubstituted C₁-C₁₀ alkyl, alkoxy, alkoxyalkyl, hydroxyalkyl, carboxyalkyl, alkylsulfonylamino, aminoalkyl, dialkylamino, alkylaminoalkyl, dialkylaminoalkyl, haloalkyl, trifluoromethyl, cycloalkyl, (cycloalkyl)alkyl, substituted or unsubstituted C₂-C₁₀ alkenyl, substituted or unsubstituted —O-allyl, —O—CH₂CH═CH₂, —O—CH═CHCH₃, substituted or unsubstituted C₂-C₁₀ alkynyl, carbamoyl, carbamyl, carboxy, carbonylamino, substituted or unsubstituted aryl, substituted or unsubstituted aralkyl, —NH₂, —NO₂, —C≡N, or heterocyclo group; R³ and R⁴ are each independently a hydroxyl, a protected hydroxyl, or an internucleoside linking group; and R⁵ and R⁸ are independently O or S. In certain embodiments, at least one nucleoside is according to Formula I in which R¹ is methyl and R² is —OH, or R¹ is methyl, R² is —OH, and R⁸ is S. In certain embodiments, at least one nucleoside is according to Formula I in which R¹ is methyl and R² is —O-methyl, or R¹ is methyl, R² is —O-methyl, and R⁸ is O. In other embodiments, the internucleoside linking group covalently links from about 5 to about 40 nucleosides.

### Compositions and Methods of Use

[0151] As set forth herein, dsRNA of the instant disclosure are designed to target a VEGF gene (including one or more mRNA splice variant thereof) that is expressed at an elevated level or continues to be expressed when it should not, and is a causal or contributing factor associated with, for example, cancer of one or more of the gastrointestinal tract, pancreas, breast, bladder, kidney, ovary, brain, colon, Kaposi's sarcoma, and squamous cell carcinoma of the head and neck, as well as leukemia, lymphoma, and multiple myeloma, non-small-lung cancer (NSCLC), neuroblastoma, arthritis, atherosclerosis, diabetic retinopathy, and intraocular neovascular disorder. In this context, a dsRNA or analog thereof of this disclosure will effectively downregulate expression of a VEGF gene to levels that prevent, alleviate, or reduce the severity or recurrence of one or more associated disease symptoms. Alternatively, for various distinct disease models in which expression of a VEGF gene is not necessarily elevated as a consequence or sequel of disease or other adverse condition, down regulation of a VEGF gene will nonetheless result in a therapeutic result by lowering gene expression (i.e., to reduce levels of a selected mRNA or protein product of a VEGF, VEGFB, VEGFC, FIGF, or PGF gene). Furthermore, dsRNAs of this disclosure may be targeted to lower expression of VEGF, which can result in upregulation of a “downstream” gene whose expression is negatively regulated, directly or indirectly, by a VEGF protein. The dsRNA molecules of the instant disclosure comprise useful reagents and can be used in methods for a variety of therapeutic, diagnostic, target validation, genomic discovery, genetic engineering, and pharmacogenomic applications.

[0152] In certain embodiments, aqueous suspensions contain dsRNA of this disclosure in admixture with suitable excipients, such as suspending agents or dispersing or wetting agents. Exemplary suspending agents include sodium carboxymethylcellulose, methylcellulose, hydropropyl-methylcellulose, sodium alginate, polyvinylpyrrolidone, gum tragacanth and gum acacia. Representative dispersing or wetting agents include naturally-occurring phosphatides (e.g., lecithin), condensation products of an alkylene oxide with fatty acids (e.g., polyoxyethylene stearate), condensation products of ethylene oxide with long chain aliphatic alcohols (e.g., heptadecaethyleneoxycetanol), condensation products of ethylene oxide with partial esters derived from fatty acids and hexitol (e.g., polyoxyethylene sorbitol monooleate), or condensation products of ethylene oxide with partial esters derived from fatty acids and hexitol anhydrides (e.g., polyethylene sorbitan monooleate). In certain embodiments, the aqueous suspensions can optionally contain one or more preservatives (e.g., ethyl or n-propyl-p-hydroxybenzoate), one or more coloring agents, one or more flavoring agents, or one or more sweetening agents (e.g., sucrose, saccharin). In additional embodiments, dispersible powders and granules suitable for preparation of an aqueous suspension by the addition of water provide dsRNA of this disclosure in admixture with a dispersing or wetting agent, suspending agent and optionally one or more preservative, coloring agent, flavoring agent, or sweetening agent.

[0153] The present disclosure includes dsRNA compositions prepared for storage or administration that include a pharmaceutically effective amount of a desired compound in a pharmaceutically acceptable carrier or diluent. Acceptable carriers or diluents for therapeutic use are well known in the pharmaceutical art, and are described, for example, in Remington's Pharmaceutical Sciences, Mack Publishing Co., A. R. Gennaro edit., 1985, hereby incorporated by reference herein. In certain embodiments, pharmaceutical compositions of this disclosure can optionally include preservatives, antioxidants, stabilizers, dyes, flavoring agents, or any combination thereof. Exemplary preservatives include sodium benzoate, sorbic acid, chlorobutanol, and esters of p-hydroxybenzoic acid.

[0154] The dsRNA compositions of the instant disclosure can be effectively employed as pharmaceutically-acceptable formulations. Pharmaceutically-acceptable formulations prevent, alter the occurrence or severity of, or treat (alleviate one or more symptom(s) to a detectable or measurable extent) of a disease state or other adverse condition in a subject. A pharmaceutically acceptable formulation includes salts of the above compounds, e.g., acid addition salts, such as salts of hydrochloric acid, hydrobromic acid, acetic acid, or benzene sulfonic acid. A pharmaceutical composition or formulation refers to a composition or formulation in a form suitable for administration into a cell, or a subject such as a human (e.g., systemic administration). The formulations of the present disclosure, having an amount of dsRNA sufficient to treat or prevent a disorder associated with VEGF gene expression are, for example, suitable for topical (e.g., creams, ointments, skin patches, eye drops, ear drops) application or administration. Other routes of administration include oral, parenteral, sublingual, bladder wash-out, vaginal, rectal, enteric, suppository, nasal, and inhalation. The term parenteral, as used herein, includes subcutaneous, intravenous, intramuscular, intraarterial, intraabdominal, intraperitoneal, intraarticular, intraocular or retrobulbar, intraaural, intrathecal, intracavitary, intracelial, intraspinal, intrapulmonary or transpulmonary, intrasynovial, and intraurethral injection or infusion techniques. The pharmaceutical compositions of the present disclosure are formulated to allow the dsRNA contained therein to be bioavailable upon administration to a subject.

[0155] In further embodiments, dsRNA of this disclosure can be formulated as oily suspensions or emulsions (e.g., oil-in-water) by suspending dsRNA in, for example, a vegetable oil (e.g., arachis oil, olive oil, sesame oil or coconut oil) or a mineral oil (e.g., liquid paraffin). Suitable emulsifying agents can be naturally-occurring gums (e.g., gum acacia or gum tragacanth), naturally-occurring phosphatides (e.g., soy bean, lecithin, esters or partial esters derived from fatty acids and hexitol), anhydrides (e.g., sorbitan monooleate), or condensation products of partial esters with ethylene oxide (e.g., polyoxyethylene sorbitan monooleate). In certain embodiments, the oily suspensions or emulsions can optionally contain a thickening agent, such as beeswax, hard paraffin or cetyl alcohol. In related embodiments, sweetening agents and flavoring agents can optionally be added to provide palatable oral preparations. In yet other embodiments, these compositions can be preserved by optionally adding an anti-oxidant, such as ascorbic acid.

[0156] In further embodiments, dsRNA of this disclosure can be formulated as syrups and elixirs with sweetening agents (e.g., glycerol, propylene glycol, sorbitol, glucose or sucrose). Such formulations can also contain a demulcent, preservative, flavoring, coloring agent, or any combination thereof. In other embodiments, pharmaceutical compositions comprising dsRNA of this disclosure can be in the form of a sterile, injectable aqueous or oleaginous suspension. The sterile injectable preparation can also be a sterile, injectable solution or suspension in a non-toxic parenterally acceptable diluent or solvent (e.g., as a solution in 1,3-butanediol). Among the exemplary acceptable vehicles and solvents useful in the compositions of this disclosure is water, Ringer's solution, or isotonic sodium chloride solution. In addition, sterile, fixed oils may be employed as a solvent or suspending medium for the dsRNA of this disclosure. For this purpose, any bland fixed oil can be employed including synthetic mono- or diglycerides. In addition, fatty acids such as oleic acid find use in the preparation of parenteral formulations.

[0157] Within certain embodiments of this disclosure, pharmaceutical compositions and methods are provided that feature the presence or administration of one or more dsRNA or analogs thereof of this disclosure, combined, complexed, or conjugated with a polypeptide, optionally formulated with a pharmaceutically-acceptable carrier, such as a diluent, stabilizer, buffer, or the like. The negatively charged dsRNA molecules of this disclosure may be administered to a patient by any standard means, with or without stabilizers, buffers, or the like, to form a composition suitable for treatment. When it is desired to use a liposome delivery mechanism, standard protocols for formation of liposomes can be followed. The compositions of the present disclosure may also be formulated and used as a tablet, capsule or elixir for oral administration, suppository for rectal administration, sterile solution, or suspension for injectable administration, either with or without other compounds known in the art. Thus, dsRNAs of the present disclosure may be administered in any form, such as nasally, transdermally, parenterally, or by local injection.

[0158] In accordance with this disclosure, dsRNA molecules (optionally substituted or modified or conjugated), compositions thereof, and methods for inhibiting expression of a VEGF gene in a cell or organism are provided. In certain embodiments, this disclosure provides methods and dsRNA compositions for treating a subject, including a human cell, tissue or individual, having a disease or at risk of developing a disease caused by or associated with the expression of a VEGF gene. In one embodiment, the method includes administering a dsRNA of this disclosure or a pharmaceutical composition containing the dsRNA to a cell or an organism, such as a mammal, such that expression of the target gene is silenced. Subjects (e.g., mammalian, human) amendable for treatment using the dsRNA molecules (optionally substituted or modified or conjugated), compositions thereof, and methods of the present disclosure include those suffering from one or more disease or condition mediated, at least in part, by overexpression or inappropriate expression of a VEGF gene, or which are amenable to treatment by reducing expression of a VEGF protein, including cancer of one or more of the gastrointestinal tract, pancreas, breast, bladder, kidney, ovary, brain, colon, Kaposi's sarcoma, and squamous cell carcinoma of the head and neck, as well as leukemia, lymphoma, and multiple myeloma, non-small-lung cancer (NSCLC), neuroblastoma, arthritis, atherosclerosis, diabetic retinopathy, and intraocular neovascular disorder. Within exemplary embodiments, the compositions and methods of this disclosure are also useful as therapeutic tools to regulate expression of VEGFA, VEGFB, VEGFC, FIGF, or PGF to treat or prevent symptoms of, for example, the conditions listed herein.

[0159] In any of the methods disclosed herein there may be used with one or more dsRNA, or substituted or modified dsRNA, as described herein, a dsRNA comprising a first strand that is complementary to any one of human VEGF mRNA as set forth in SEQ ID NO:1158, 1159, 1160, 1161, 1162, 1163, or 1164 (i.e., VEGF variants 1 to 7), human VEGFB mRNA as set forth in SEQ ID NO:2289, human VEGFC mRNA as set forth in SEQ ID NO:2398, human FIGF mRNA as set forth in SEQ ID NO:2602, or human PGF mRNA as set forth in SEQ ID NO:2806, and a second strand and a third strand that is each complementary to non-overlapping regions of the first strand, wherein the second strand and third strands can anneal with the first strand to form at least two double-stranded regions spaced apart by up to 10 nucleotides and thereby forming a gap between the second and third strands. In other embodiments, subjects can be effectively treated, prophylactically or therapeutically, by administering an effective amount of one or more dsRNA having a first strand that is complementary to a human vascular endothelial growth factor (VEGF) mRNA as set forth in SEQ ID NO:1158-1164, 2289, 2398, 2602, or 2806, and a second strand and a third strand that is each complementary to non-overlapping regions of the first strand, wherein the second strand and third strands can anneal with the first strand to form at least two double-stranded regions spaced apart by up to 10 nucleotides and thereby forming a gap between the second and third strands, and wherein the mdRNA molecule optionally includes at least one double-stranded region of 5 base pairs to 13 base pairs and at least one pyrimidine of the mdRNA is substituted with a pyrimidine nucleoside according to Formula I or II:

[chemical structure]

wherein R¹ and R² are each independently a —H, —OH, —OCH₃, —OCH₂OCH₂CH₃, —OCH₂CH₂OCH₃, halogen, substituted or unsubstituted C₁-C₁₀ alkyl, alkoxy, alkoxyalkyl, hydroxyalkyl, carboxyalkyl, alkylsulfonylamino, aminoalkyl, dialkylamino, alkylaminoalkyl, dialkylaminoalkyl, haloalkyl, trifluoromethyl, cycloalkyl, (cycloalkyl)alkyl, substituted or unsubstituted C₂-C₁₀ alkenyl, substituted or unsubstituted —O-allyl, —O—CH₂CH═CH₂, —O—CH═CHCH₃, substituted or unsubstituted C₂-C₁₀ alkynyl, carbamoyl, carbamyl, carboxy, carbonylamino, substituted or unsubstituted aryl, substituted or unsubstituted aralkyl, —NH₂, —NO₂, —C≡N, or heterocyclo group; R³ and R⁴ are each independently a hydroxyl, a protected hydroxyl, or an internucleoside linking group; and R⁵ and R⁸ are independently O or S. In certain embodiments, at least one nucleoside is according to Formula I in which R¹ is methyl and R² is —OH, or R¹ is methyl, R² is —OH, and R⁸ is S. In certain embodiments, at least one nucleoside is according to Formula I in which R¹ is methyl and R² is —O-methyl, or R¹ is methyl, R² is —O-methyl, and R⁸ is O. In other embodiments, the internucleoside linking group covalently links from about 5 to about 40 nucleosides.

[0160] In any of the methods described herein, the dsRNA used may include multiple modifications. For example, a dsRNA can have at least one 5-methyluridine, 2-thio-5-methyluridine, LNA, 2′-methoxy, 2′-fluoro, 2′-deoxy, phosphorothioate linkage, inverted base terminal cap, or any combination thereof. In certain exemplary methods, a dsRNA will have from one to all uridines substituted with 5-methyluridine and have up to about 75% LNA substitutions. In other exemplary methods, a dsRNA will have from one to all uridines substituted with 5-methyluridine and have up to about 75% 2′-methoxy substitutions provided the 2′-methoxy substitutions are not at the Argonaute cleavage site. In still other exemplary methods, a dsRNA will have from one to all uridines substituted with 5-methyluridine and have up to about 100% 2′-fluoro substitutions. In further exemplary methods, a dsRNA will have from one to all uridines substituted with 5-methyluridine and have up to about 75% 2′-deoxy substitutions. In further exemplary methods, a dsRNA will have up to about 75% LNA substitutions and have up to about 75% 2′-methoxy substitutions. In still other embodiments, a dsRNA will have up to about 75% LNA substitutions and have up to about 100% 2′-fluoro substitutions. In further exemplary methods, a dsRNA will have up to about 75% LNA substitutions and have up to about 75% 2′-deoxy substitutions. In further exemplary methods, a dsRNA will have up to about 75% 2′-methoxy substitutions and have up to about 100% 2′-fluoro substitutions. In further exemplary methods, a dsRNA will have up to about 75% 2′-methoxy substitutions and have up to about 75% 2′-deoxy substitutions. In further embodiments, a dsRNA will have up to about 100% 2′-fluoro substitutions and have up to about 75% 2′-deoxy substitutions.

[0161] In further exemplary methods for using multiply modified dsRNA, a dsRNA will have from one to all uridines substituted with 5-methyluridine, up to about 75% LNA substitutions, and up to about 75% 2′-methoxy substitutions. In still further exemplary methods, a dsRNA will have from one to all uridines substituted with 5-methyluridine, up to about 75% LNA substitutions, and up to about 100% 2′-fluoro substitutions. In further exemplary methods, a dsRNA will have from one to all uridines substituted with 5-methyluridine, up to about 75% LNA substitutions, and up to about 75% 2′-deoxy substitutions. In further exemplary methods, a dsRNA will have from one to all uridines substituted with 5-methyluridine, up to about 75% 2′-methoxy substitutions, and up to about 75% 2′-fluoro substitutions. In further exemplary methods, a dsRNA will have from one to all uridines substituted with 5-methyluridine, up to about 75% 2′-methoxy substitutions, and up to about 75% 2′-deoxy substitutions. In further exemplary methods, a dsRNA will have from one to all uridines substituted with 5-methyluridine, up to about 100% 2′-fluoro substitutions, and up to about 75% 2′-deoxy substitutions. In yet further exemplary methods, a dsRNA will have from one to all uridines substituted with 5-methyluridine, up to about 75% LNA substitutions, up to about 75% 2′-methoxy, up to about 100% 2′-fluoro, and up to about 75% 2′-deoxy substitutions. In other exemplary methods, a dsRNA will have up to about 75% LNA substitutions, up to about 75% 2′-methoxy substitutions, and up to about 100% 2′-fluoro substitutions. In further exemplary methods, a dsRNA will have up to about 75% LNA substitutions, up to about 75% 2′-methoxy substitutions, and up to about 75% 2′-deoxy substitutions. In further exemplary methods, a dsRNA will have up to about 75% LNA substitutions, up to about 100% 2′-fluoro substitutions, and up to about 75% 2′-deoxy substitutions. In still further exemplary methods, a dsRNA will have up to about 75% 2′-methoxy, up to about 100% 2′-fluoro, and up to about 75% 2′-deoxy substitutions.

[0162] In any of these exemplary methods using multiply modified dsRNA, the dsRNA may further comprise up to 100% phosphorothioate internucleoside linkages, from one to ten or more inverted base terminal caps, or any combination thereof. Additionally, any of these multiple modification embodiments may have these multiple modifications on one strand, two strands, three strands, a plurality of strands, or all strands. Finally, in any of these multiple modification dsRNA, the dsRNA must have gene silencing activity.

[0163] In further embodiments, subjects can be effectively treated, prophylactically or therapeutically, by administering an effective amount of one or more dsRNA, or substituted or modified dsRNA as described herein, having a first strand that is complementary to any one of human VEGF mRNA as set forth in SEQ ID NO:1158, 1159, 1160, 1161, 1162, 1163, or 1164 (i.e., VEGF variants 1 to 7), human VEGFB mRNA as set forth in SEQ ID NO:2289, human VEGFC mRNA as set forth in SEQ ID NO:2398, human FIGF mRNA as set forth in SEQ ID NO:2602, or human PGF mRNA as set forth in SEQ ID NO:2806, and a second strand and a third strand that is each complementary to non-overlapping regions of the first strand, wherein the second strand and third strands can anneal with the first strand to form at least two double-stranded regions spaced apart by up to 10 nucleotides and thereby forming a gap between the second and third strands, and wherein the combined double-stranded regions total about 15 base pairs to about 40 base pairs and the mdRNA molecule optionally has blunt ends. In still further embodiments, methods disclosed herein there may be used with one or more dsRNA that comprises a first strand that is complementary to a VEGF mRNA as set forth in SEQ ID NO:1158-1164, 2289, 2398, 2602, or 2806, and a second strand and a third strand that is each complementary to non-overlapping regions of the first strand, wherein the second strand and third strands can anneal with the first strand to form at least two double-stranded regions spaced apart by up to 10 nucleotides and thereby forming a gap between the second and third strands, and wherein the combined double-stranded regions total about 15 base pairs to about 40 base pairs or the mdRNA molecule optionally includes at least one double-stranded region of 5 base pairs to 13 base pairs or optionally has blunt ends, or any combination thereof, and at least one pyrimidine of the mdRNA is substituted with a pyrimidine nucleoside according to Formula I or II:

[chemical structure]

wherein R¹ and R² are each independently a —H, —OH, —OCH₃, —OCH₂OCH₂CH₃, —OCH₂CH₂OCH₃, halogen, substituted or unsubstituted C₁-C₁₀ alkyl, alkoxy, alkoxyalkyl, hydroxyalkyl, carboxyalkyl, alkylsulfonylamino, aminoalkyl, dialkylamino, alkylaminoalkyl, dialkylaminoalkyl, haloalkyl, trifluoromethyl, cycloalkyl, (cycloalkyl)alkyl, substituted or unsubstituted C₂-C₁₀ alkenyl, substituted or unsubstituted —O-allyl, —O—CH₂CH═CH₂, —O—CH═CHCH₃, substituted or unsubstituted C₂-C₁₀ alkynyl, carbamoyl, carbamyl, carboxy, carbonylamino, substituted or unsubstituted aryl, substituted or unsubstituted aralkyl, —NH₂, —NO₂, —C≡N, or heterocyclo group; R³ and R⁴ are each independently a hydroxyl, a protected hydroxyl, or an internucleoside linking group; and R⁵ and R⁸ are independently O or S. In certain embodiments, at least one nucleoside is according to Formula I in which R¹ is methyl and R² is —OH, or R¹ is methyl, R² is —OH, and R⁸ is S. In certain embodiments, at least one nucleoside is according to Formula I in which R¹ is methyl and R² is —O-methyl, or R¹ is methyl, R² is —O-methyl, and R⁸ is O. In other embodiments, the internucleoside linking group covalently links from about 5 to about 40 nucleosides.

[0164] Within additional aspects of this disclosure, combination formulations and methods are provided comprising an effective amount of one or more dsRNA of the present disclosure in combination with one or more secondary or adjunctive active agents that are formulated together or administered coordinately with the dsRNA of this disclosure to control a VEGF-associated disease or condition as described herein. Useful adjunctive therapeutic agents in these combinatorial formulations and coordinate treatment methods include, for example, enzymatic nucleic acid molecules, allosteric nucleic acid molecules, antisense, decoy, or aptamer nucleic acid molecules, antibodies such as monoclonal antibodies, small molecules and other organic or inorganic compounds including metals, salts and ions, and other drugs and active agents indicated for treating a VEGF-associated disease or condition, including chemotherapeutic agents used to treat cancer, steroids, non-steroidal anti-inflammatory drugs (NSAIDs), tyrosine kinase inhibitors, or the like.

[0165] Exemplary chemotherapeutic agents include alkylating agents (e.g., cisplatin, oxaliplatin, carboplatin, busulfan, nitrosoureas, nitrogen mustards, uramustine, temozolomide), antimetabolites (e.g., aminopterin, methotrexate, mercaptopurine, fluorouracil, cytarabine), taxanes (e.g., paclitaxel, docetaxel), anthracyclines (e.g., doxorubicin, daunorubicin, epirubicin, idaruicin, mitoxantrone, valrubicin), bleomycin, mytomycin, actinomycin, hydroxyurea, topoisomerase inhibitors (e.g., camptothecin, topotecan, irinotecan, etoposide, teniposide), monoclonal antibodies (e.g., alemtuzumab, bevacizumab, cetuximab, gemtuzumab, panitumumab, rituximab, tositumomab, trastuzumab), vinca alkaloids (e.g., vincristine, vinblastine, vindesine, vinorelbine), cyclophosphamide, prednisone, leucovorin, oxaliplatin.

[0166] To practice the coordinate administration methods of this disclosure, a dsRNA is administered, simultaneously or sequentially, in a coordinated treatment protocol with one or more of the secondary or adjunctive therapeutic agents contemplated herein. The coordinate administration may be done in any order, and there may be a time period while only one or both (or all) active therapeutic agents, individually or collectively, exert their biological activities. A distinguishing aspect of all such coordinate treatment methods is that the dsRNA present in a composition elicits some favorable clinical response, which may or may not be in conjunction with a secondary clinical response provided by the secondary therapeutic agent. For example, the coordinate administration of the dsRNA with a secondary therapeutic agent as contemplated herein can yield an enhanced (synergistic) therapeutic response beyond the therapeutic response elicited by either or both the purified dsRNA or secondary therapeutic agent alone.

[0167] In another embodiment, a dsRNA of this disclosure can include a conjugate member on one or more of the terminal nucleotides of a dsRNA. The conjugate member can be, for example, a lipophile, a terpene, a protein binding agent, a vitamin, a carbohydrate, or a peptide. For example, the conjugate member can be naproxen, nitroindole (or another conjugate that contributes to stacking interactions), folate, ibuprofen, or a C5 pyrimidine linker. In other embodiments, the conjugate member is a glyceride lipid conjugate (e.g., a dialkyl glyceride derivatives), vitamin E conjugates, or thio-cholesterols. Additional conjugate members include peptides that function, when conjugated to a modified dsRNA of this disclosure, to facilitate delivery of the dsRNA into a target cell, or otherwise enhance delivery, stability, or activity of the dsRNA when contacted with a biological sample (e.g., a target cell expressing VEGF). Exemplary peptide conjugate members for use within these aspects of this disclosure, include peptides PN27, PN28, PN29, PN58, PN61, PN73, PN158, PN159, PN173, PN182, PN183, PN₂O₂, PN₂O₄, PN250, PN361, PN365, PN₄O₄, PN453, PN509, and PN963, described, for example, in U.S. Patent Application Publication Nos. 2006/0040882 and 2006/0014289, and U.S. Provisional Patent Application Nos. 60/822,896 and 60/939,578; and PCT Application PCT/US2007/075744, which are all incorporated herein by reference. In certain embodiments, when peptide conjugate partners are used to enhance delivery of dsRNA or analogs thereof of this disclosure, the resulting dsRNA formulations and methods will often exhibit further reduction of an interferon response in target cells as compared to dsRNAs delivered in combination with alternate delivery vehicles, such as lipid delivery vehicles (e.g., Lipofectamine™).

[0168] In still another embodiment, a dsRNA or analog thereof of this disclosure may be conjugated to the polypeptide and admixed with one or more non-cationic lipids or a combination of a non-cationic lipid and a cationic lipid to form a composition that enhances intracellular delivery of the dsRNA as compared to delivery resulting from contacting the target cells with a naked dsRNA. In more detailed aspects of this disclosure, the mixture, complex or conjugate comprising a dsRNA and a polypeptide can be optionally combined with (e.g., admixed or complexed with) a cationic lipid, such as Lipofectine™. To produce these compositions comprised of a polypeptide, dsRNA and a cationic lipid, the dsRNA and peptide may be mixed together first in a suitable medium such as a cell culture medium, after which the cationic lipid is added to the mixture to form a dsRNA/delivery peptide/cationic lipid composition. Optionally, the peptide and cationic lipid can be mixed together first in a suitable medium such as a cell culture medium, followed by the addition of the dsRNA to form the dsRNA/delivery peptide/cationic lipid composition.

[0169] This disclosure also features the use of dsRNA compositions comprising surface-modified liposomes containing, for example, poly(ethylene glycol) lipids (PEG-modified, or long-circulating liposomes or stealth liposomes) (Lasic et al., Chem. Rev. 95:2601, 1995; Ishiwata et al., Chem. Pharm. Bull. 43:1005, 1995; Lasic et al., Science 267:1275, 1995; Oku et al., Biochim. Biophys. Acta 1238:86, 1995; Liu et al., J. Biol. Chem. 42:24864, 1995; Choi et al., PCT Publication No. WO 96/10391; Ansell et al., PCT Publication No. WO 96/10390; Holland et al., PCT Publication No. WO 96/10392).

[0170] In another embodiment, compositions are provided for targeting dsRNA molecules of this disclosure to specific cell types, such as hepatocytes. For example, dsRNA can be complexed or conjugated glycoproteins or synthetic glycoconjugates glycoproteins or synthetic glycoconjugates having branched galactose (e.g., asialoorosomucoid), N-acetyl-D-galactosamine, or mannose (see, e.g., Wu and Wu, J. Biol. Chem. 262:4429, 1987; Baenziger and Fiete, Cell 22: 611, 1980; Connolly et al., J. Biol. Chem. 257:939, 1982; Lee and Lee, Glycoconjugate J. 4:317, 1987; Ponpipom et al., J. Med. Chem. 24:1388, 1981) for a targeted delivery to, for example, the liver.

[0171] A pharmaceutically effective dose is that dose required to prevent, inhibit the occurrence of, or treat (alleviate a symptom to some extent, preferably all of the symptoms) a disease state. The pharmaceutically effective dose depends on the type of disease, the composition used, the route of administration, the type of subject being treated, the physical characteristics of the specific subject under consideration for treatment, concurrent medication, and other factors that those skilled in the medical arts will recognize. For example, an amount between 0.1 mg/kg and 100 mg/kg body weight/day of active ingredients may be administered depending on the potency of a dsRNA of this disclosure.

[0172] Dosage levels in the order of about 0.1 mg to about 140 mg per kilogram of body weight per day can be useful in the treatment of the above-indicated conditions (about 0.5 mg to about 7 g per patient per day). The amount of active ingredient that can be combined with the carrier materials to produce a single dosage form varies depending upon the host treated and the particular mode of administration. Dosage unit forms generally contain between from about 1 mg to about 500 mg of an active ingredient.

[0173] It is understood that the specific dose level for any particular patient depends upon a variety of factors including the activity of the specific compound employed, the age, body weight, general health, sex, diet, time of administration, route of administration, and rate of excretion, drug combination and the severity of the particular disease undergoing therapy. Following administration of dsRNA compositions according to the formulations and methods of this disclosure, test subjects will exhibit about a 10% up to about a 99% reduction in one or more symptoms associated with the disease or disorder being treated, as compared to placebo-treated or other suitable control subjects.

[0174] Nucleic acid molecules and polypeptides can be administered to cells by a variety of methods known to those of skill in the art, including administration within formulations that comprise a dsRNA alone, a dsRNA and a polypeptide complex/conjugate alone, or that further comprise one or more additional components, such as a pharmaceutically acceptable carrier, diluent, excipient, adjuvant, emulsifier, stabilizer, preservative, or the like. Other exemplary substances used to approximate physiological conditions include pH adjusting and buffering agents, tonicity adjusting agents, and wetting agents, for example, sodium acetate, sodium lactate, sodium chloride, potassium chloride, calcium chloride, sorbitan monolaurate, triethanolamine oleate, and mixtures thereof. For solid compositions, conventional nontoxic pharmaceutically acceptable carriers can be used which include, for example, pharmaceutical grades of mannitol, lactose, starch, magnesium stearate, sodium saccharin, talcum, cellulose, glucose, sucrose, magnesium carbonate, and the like.

[0175] In certain embodiments, the dsRNA and compositions thereof can be encapsulated in liposomes, administered by iontophoresis, or incorporated into other vehicles, such as hydrogels, cyclodextrins, biodegradable nanocapsules, bioadhesive microspheres, or proteinaceous vectors (see, e.g., PCT Publication No. WO 00/53722). In certain embodiments of this disclosure, the dsRNA may be administered in a time release formulation, for example, in a composition that includes a slow release polymer. The dsRNA can be prepared with carriers that will protect against rapid release, for example, a controlled release vehicle such as a polymer, microencapsulated delivery system, or bioadhesive gel. Prolonged delivery of the dsRNA, in various compositions of this disclosure can be brought about by including in the composition agents that delay absorption, for example, aluminum monosterate hydrogels and gelatin.

[0176] Alternatively, a nucleic acid/peptide/vehicle combination can be locally delivered by direct injection or by use of, for example, an infusion pump. Direct injection of the nucleic acid molecules of this disclosure, whether subcutaneous, intramuscular, or intradermal, can take place using standard needle and syringe methodologies or by needle-free technologies, such as those described in Conry et al. (Clin. Cancer Res. 5:2330, 1999) and PCT Publication No. WO 99/31262.

[0177] The dsRNA of this disclosure and compositions thereof may be administered to subjects by a variety of mucosal administration modes, including by oral, rectal, vaginal, intranasal, intrapulmonary, or transdermal delivery, or by topical delivery to the eyes, ears, skin, or other mucosal surfaces. In some aspects of this invention, the mucosal tissue layer includes an epithelial cell layer. The epithelial cell can be pulmonary, tracheal, bronchial, alveolar, nasal, buccal, epidermal, or gastrointestinal. Compositions of this disclosure can be administered using conventional actuators such as mechanical spray devices, as well as pressurized, electrically activated, or other types of actuators. The dsRNAs can also be administered in the form of suppositories, e.g., for rectal administration of the drug. These compositions can be prepared by mixing the drug with a suitable non-irritating excipient that is solid at ordinary temperatures but liquid at the rectal temperature and will therefore melt in the rectum to release the drug. Such materials include cocoa butter and polyethylene glycols.

[0178] Further methods for delivery of nucleic acid molecules, such as the dsRNAs of this disclosure, are described, for example, in Boado et al., J. Pharm. Sci. 87:1308, 1998; Tyler et al., FEBS Lett. 421:280, 1999; Pardridge et al., Proc. Nat'l Acad. Sci. USA 92:5592, 1995; Boado, Adv. Drug Delivery Rev. 15:73, 1995; Aldrian-Herrada et al., Nucleic Acids Res. 26:4910, 1998; Tyler et al., Proc. Nat'l Acad. Sci. USA 96:7053-7058, 1999; Akhtar et al., Trends Cell Bio. 2:139, 1992; “Delivery Strategies for Antisense Oligonucleotide Therapeutics,” ed. Akhtar, 1995, Maurer et al., Mol. Membr. Biol. 16:129, 1999; Hofland and Huang, Handb. Exp. Pharmacol 137:165, 1999; and Lee et al., ACS Symp. Ser. 752:184, 2000. Sullivan et al. (PCT Publication No. WO 94/02595) further describe general methods for delivery of enzymatic nucleic acid molecules, which methods can be used to supplement or complement delivery of dsRNA contemplated within this disclosure.

[0179] A dosage form of a dsRNA or composition thereof of this disclosure can be liquid, in the form of droplets or an emulsion or a micelle, or in the form of an aerosol. A dosage form of a dsRNA or composition thereof of this disclosure can be solid, which can be reconstituted in a liquid prior to administration. The solid can be administered as a powder. The solid can be in the form of a capsule, tablet, or gel.

[0180] In addition to in vivo gene inhibition, a skilled artisan will appreciate that the dsRNA and analogs thereof of the present disclosure are useful in a wide variety of in vitro applications, such as scientific and commercial research (e.g., elucidation of physiological pathways, drug discovery and development), and medical and veterinary diagnostics. In general, the method involves the introduction of the dsRNA agent into a cell using known techniques (e.g., absorption through cellular processes, or by auxiliary agents or devices, such as electroporation, lipofection, or through the use of peptide conjugates), then maintaining the cell for a time sufficient to obtain degradation of a VEGF mRNA.

[0181] All U.S. patents, U.S. patent application publications, U.S. patent applications, foreign patents, foreign patent applications, non-patent publications, figures, tables, and websites referred to in this specification are expressly incorporated herein by reference, in their entirety.

### EXAMPLES

### Example 1

[0182] Knockdown of Gene Expression by mdRNA

[0183] The gene silencing activity of dsRNA as compared to nicked or gapped versions of the same dsRNA was examined using a dual fluorescence assay. A total of 22 different genes were targeted at ten different sites each (see Table 1).

[0184] A Dicer substrate dsRNA molecule was used, which has a 25 nucleotide sense strand, a 27 nucleotide antisense strand, and a two deoxynucleotide overhang at the 3′-end of the antisense strand (referred to as a 25/27 dsRNA). The nicked version of each dsRNA Dicer substrate has a nick at one of positions 9 to 16 on the sense strand as measured from the 5′-end of the sense strand. For example, an ndsRNA having a nick at position 11 has three strands—a 5′-sense strand of 11 nucleotides, a 3′-sense strand of 14 nucleotides, and an antisense strand of 27 nucleotides (which is also referred to as an N11-14/27 mdRNA). In addition, each of the sense strands of the ndsRNA have three locked nucleic acids (LNAs) evenly distributed along each sense fragment. If the nick is at position 9, then the LNAs can be found at positions 2, 6, and 9 of the 5′ sense strand fragment and at positions 11, 18, and 23 of the 3′ sense strand fragment. If the nick is at position 10, then the LNAs can be found at positions 2, 6, and 10 of the 5′ sense strand fragment and at positions 12, 18, and 23 of the 3′ sense strand fragment. If the nick is at position 11, then the LNAs can be found at positions 2, 6, and 11 of the 5′ sense strand fragment and at positions 13, 18, and 23 of the 3′ sense strand fragment. If the nick is at position 12, then the LNAs can be found at positions 2, 6, and 12 of the 5′ sense strand fragment and at positions 14, 18, and 23 of the 3′ sense strand fragment. If the nick is at position 13, then the LNAs can be found at positions 2, 7, and 13 of the 5′ sense strand fragment and at positions 15, 18, and 23 of the 3′ sense strand fragment. If the nick is at position 14, then the LNAs can be found at positions 2, 7, and 14 of the 5′ sense strand fragment and at positions 16, 18, and 23 of the 3′ sense strand fragment. If the nick is at position 15, then the LNAs can be found at positions 2, 8, and 15 of the 5′ sense strand fragment and at positions 17, 19, and 23 of the 3′ sense strand fragment. If the nick is at position 16, then the LNAs can be found at positions 2, 8, and 16 of the 5′ sense strand fragment and at positions 18, 19, and 23 of the 3′ sense strand fragment. Similarly, a gapped version of each dsRNA Dicer substrate has a single nucleotide missing at one of positions 10 to 17 on the sense strand as measured from the 5′-end of the sense strand. For example, a gdsRNA having a gap at position 11 has three strands—a 5′-sense strand of 11 nucleotides, a 3′-sense strand of 13 nucleotides, and an antisense strand of 27 nucleotides (which is also referred to as G11-(1)-13/27 mdRNA). In addition, each of the sense strands of the gdsRNA contain three locked nucleic acids (LNAs) evenly distributed along each sense fragment (as described for the nicked counterparts).

[0185] In sum, three dsRNA were tested at each of the ten different sites per gene—an unmodified dsRNA, a nicked mdRNA with three LNAs per sense strand fragment, and a single nucleotide gapped mdRNA with three LNAs per sense strand fragment. In other words, 660 different dsRNA were examined.

[0186] Briefly, multiwell plates were seeded with about 7-8×10⁵ HeLa cells/well in DMEM having 10% fetal bovine serum, and incubated overnight at 37° C./5% CO₂. The HeLa cell medium was changed to serum-free DMEM just prior to transfection. The psiCHECK™-2 vector, containing about a 1,000 basepair insert of a target gene, diluted in serum-free DMEM was mixed with diluted GenJet™ transfection reagent (SignalDT Biosystems, Hayward, Calif.) according to the manufacturer's instructions and then incubated at room temperature for 10 minutes. The GenJet/psiCHECK™-2-[target gene insert] solution was added to the HeLa cells and then incubated at 37° C., 5% CO₂ for 4.5 hours. After the vector transfection, cells were trypsinized and suspended in antibiotic-free DMEM containing 10% FBS at a concentration of 10⁵ cells per mL.

[0187] To transfect the dsRNA, the dsRNA was formulated in OPTI-MEM I reduced serum medium (Gibco® Invitrogen, Carlsbad, Calif.) and placed in multiwell plates. Then Lipofectamine™ RNAiMAX (Invitrogen) was mixed with OPTI-MEM per manufacture's specifications, added to each well containing dsRNA, mixed manually, and incubated at room temperature for 10-20 minutes. Then 30 μL of vector-transfected HeLa cells at 10⁵ cells per mL were added to each well (final dsRNA concentration of 25 nM), the plates were spun for 30 seconds at 1,000 rpm, and then incubated at 37° C./5% CO₂ for 2 days. The Cell Titer Blue (CTB) reagent (Promega, Madison, Wisconson) was used to assay for cell viability and proliferation—none of the dsRNA showed any substantial toxicity.

[0188] After transfecting, the media and CTB reagent were removed and the wells washed once with 100 PBS. Cells were assayed for firefly and Renilla luciferase reporter activity by first adding Dual-Glo™ Luciferase Reagent (Promega, Madison, Wis.) for 10 minutes with shaking, and then quantitating the luminescent signal on a VICTOR³™1420 Multilabel Counter (PerkinElmer). After measuring the firefly luminescence, Stop & Glob Reagent (Promega, Madison, Wis.) was added for 10 minutes with shaking to simultaneously quench the firefly reaction and initiate the Renilla luciferase reaction, which was then quantitated on a VICTOR³™1420 Multilabel Counter (PerkinElmer). The results are presented in Table 1.

TABLE 1
Gene Silencing Activity* of dsRNA Dicer Substrate and mdRNA (nicked or gapped) Dicer Substrate

| | | | Dicer | Dicer | | | | | | | | |
|---|---|---|---|---|---|---|---|---|---|---|---|---|
| | | | SEQ | Mean | Dicer | Nicked | Nicked | Nicked | Gapped | Gapped | Gapped | Length |
| Set | Target | Pos† | ID NOS‡ | (%) | 95% CI | SEQ ID NOS | Mean (%) | 95% CI | SEQ ID NOS | Mean (%) | 95% CI | 5′-S\hat{ } |
| 1 | AKT1 | 1862 | 63, 283 | 20.6 | 4.0% | 503, 723, 283 | 23.5 | 5.7% | 503, 940, 283 | 54.3 | 12.0% | 14 |
| 2 | AKT1 | 1883 | 64, 284 | 29.7 | 7.3% | 504, 724, 284 | 51.4 | 6.7% | 504, 941, 284 | 76.9 | 19.5% | 12 |
| 3 | AKT1 | 2178 | 65, 285 | 15.4 | 2.4% | 505, 725, 285 | 22.3 | 6.4% | 505, 942, 285 | 24.4 | 5.1% | 14 |
| 4 | AKT1 | 2199 | 66, 286 | 26.4 | 3.6% | 506, 726, 286 | 62.7 | 6.6% | 506, 943, 286 | 66.8 | 10.8% | 15 |
| 5 | AKT1 | 2264 | 67, 287 | 35.2 | 7.3% | 507, 727, 287 | 34.1 | 7.3% | 507, 944, 287 | 31.3 | 5.2% | 12 |
| 6 | AKT1 | 2580 | 68, 288 | 27.6 | 5.7% | 508, 728, 288 | 40.1 | 8.3% | 508, 945, 288 | 91.5 | 17.0% | 12 |
| 7 | AKT1 | 2606 | 69, 289 | 14.0 | 2.6% | 509, 729, 289 | 14.9 | 3.2% | 509, 946, 289 | 33.4 | 6.9% | 11 |
| 8 | AKT1 | 2629 | 70, 290 | 21.0 | 10.1% | 510, 730, 290 | 13.5 | 2.4% | 510, 947, 290 | 13.6 | 2.1% | 12 |
| 9 | AKT1 | 2661 | 71, 291 | 37.4 | 6.6% | 511, 731, 291 | 41.0 | 12.1% | 511, 948, 291 | 71.6 | 11.9% | 15 |
| 10 | AKT1 | 2663 | 72, 292 | 18.1 | 4.3% | 512, 732, 292 | 23.0 | 5.9% | 512, 949, 292 | 51.4 | 9.2% | 14 |
| 11 | BCR-ABL (b2a2) | 66 | 73, 293 | 16.9 | 5.9% | 513, 733, 293 | 30.4 | 10.5% | 513, 950, 293 | 38.2 | 11.7% | 13 |
| 12 | BCR-ABL (b2a2) | 190 | 74, 294 | 40.0 | 11.6% | 514, 734, 294 | 22.0 | 6.4% | 514, 951, 294 | 34.6 | 12.0% | 14 |
| 13 | BCR-ABL (b2a2) | 282 | 75, 295 | 24.2 | 5.2% | 515, 735, 295 | 37.6 | 8.2% | 515, 952, 295 | 34.6 | 8.6% | 13 |
| 14 | BCR-ABL (b2a2) | 284 | 76, 296 | 50.9 | 6.9% | 516, 736, 296 | 38.3 | 7.8% | 516, 953, 296 | 68.3 | 18.0% | 13 |
| 15 | BCR-ABL (b2a2) | 287 | 77, 297 | 45.5 | 13.2% | 517, 737, 297 | 39.6 | 11.5% | 517, 954, 297 | 75.2 | 17.2% | 14 |
| 16 | BCR-ABL (b2a2) | 289 | 78, 298 | 36.9 | 7.7% | 518, 738, 298 | 40.0 | 8.9% | 518, 955, 298 | 60.9 | 12.3% | 14 |
| 17 | BCR-ABL (b2a2) | 293 | 79, 299 | 55.9 | 9.8% | 519, 739, 299 | 58.6 | 14.7% | 519, 956, 299 | 87.0 | 14.3% | 13 |
| 18 | BCR-ABL (b2a2) | 461 | 80, 300 | 38.4 | 9.4% | 520, 740, 300 | 35.9 | 12.1% | 520, 957, 300 | 28.6 | 10.2% | 13 |
| 19 | BCR-ABL (b2a2) | 462 | 81, 301 | 31.1 | 13.7% | 521, 741, 301 | 26.5 | 5.5% | 521, 958, 301 | 35.8 | 10.7% | 14 |
| 20 | BCR-ABL (b2a2) | 561 | 82, 302 | 17.7 | 3.4% | 522, 742, 302 | 20.7 | 3.4% | 522, 959, 302 | 35.5 | 10.6% | 12 |
| 21 | BCR-ABL (b3a2) | 352 | 83, 303 | 45.4 | 7.0% | 523, 743, 303 | 39.8 | 8.3% | 523, 960, 303 | 45.5 | 11.0% | 12 |
| 22 | BCR-ABL (b3a2) | 353 | 84, 304 | 22.6 | 1.8% | 524, 744, 304 | 20.5 | 5.1% | 524, 961, 304 | 66.1 | 17.8% | 12 |
| 23 | BCR-ABL (b3a2) | 356 | 85, 305 | 11.9 | 2.5% | 525, 745, 305 | 28.4 | 5.8% | 525, 962, 305 | 56.0 | 10.6% | 13 |
| 24 | BCR-ABL (b3a2) | 357 | 86, 306 | 24.5 | 6.0% | 526, 746, 306 | 25.6 | 7.5% | 526, 963, 306 | 39.2 | 10.0% | 13 |
| 25 | BCR-ABL (b3a2) | 359 | 87, 307 | 56.8 | 9.3% | 527, 747, 307 | 42.4 | 7.3% | 527, 964, 307 | 46.4 | 9.5% | 13 |
| 26 | BCR-ABL (b3a2) | 360 | 88, 308 | 32.3 | 5.0% | 528, 748, 308 | 37.2 | 7.3% | 528, 965, 308 | 55.3 | 13.8% | 13 |
| 27 | BCR-ABL (b3a2) | 362 | 89, 309 | 12.4 | 3.2% | 529, 737, 309 | 26.3 | 9.8% | 529, 954, 309 | 46.2 | 8.3% | 14 |
| 28 | BCR-ABL (b3a2) | 410 | 90, 310 | 66.2 | 12.2% | 530, 749, 310 | 55.9 | 11.2% | 530, 966, 310 | 58.4 | 16.4% | 12 |
| 29 | BCR-ABL (b3a2) | 629 | 91, 311 | 35.0 | 11.7% | 531, 750, 311 | 46.5 | 10.1% | 531, 967, 311 | 41.0 | 9.0% | 13 |
| 30 | BCR-ABL (b3a2) | 727 | 92, 312 | 83.4 | 13.6% | 532, 751, 312 | 76.7 | 22.5% | 532, 968, 312 | 62.9 | 10.9% | 12 |
| 31 | EGFR | 4715 | 93, 313 | 15.3 | 2.2% | 533, 752, 313 | 9.4 | 0.9% | 533, 969, 313 | 11.3 | 1.7% | 11 |
| 32 | EGFR | 4759 | 94, 314 | 3.8 | 0.4% | 534, 753, 314 | 6.3 | 0.8% | 534, 970, 314 | 8.4 | 1.1% | 12 |
| 33 | EGFR | 4810 | 95, 315 | 5.2 | 0.6% | 535, 754, 315 | 5.8 | 0.7% | 535, 971, 315 | 7.2 | 1.0% | 13 |
| 34 | EGFR | 5249 | 96, 316 | 2.6 | 0.4% | 536, 755, 316 | 16.6 | 1.8% | 536, 972, 316 | 42.9 | 3.5% | 14 |
| 35 | EGFR | 5279 | 97, 317 | 7.6 | 1.0% | 537, 756, 317 | 10.6 | 1.1% | 537, 973, 317 | 11.8 | 1.7% | 13 |
| 36 | EGFR | 5374 | 98, 318 | 9.6 | 1.0% | 538, 757, 318 | 8.7 | 0.9% | 538, 974, 318 | 34.7 | 4.3% | 12 |
| 37 | EGFR | 5442 | 99, 319 | 4.1 | 0.8% | 539, 758, 319 | 15.1 | 1.8% | 539, 975, 319 | 19.7 | 2.4% | 12 |
| 38 | EGFR | 5451 | 100, 320 | 5.1 | 0.3% | 540, 759, 320 | 11.5 | 1.3% | 540, 976, 320 | 16.5 | 3.0% | 13 |
| 39 | EGFR | 5469 | 101, 321 | 5.6 | 0.8% | 541, 760, 321 | 5.1 | 0.5% | 541, 977, 321 | 12.2 | 2.5% | 13 |
| 40 | EGFR | 5483 | 102, 322 | 2.2 | 0.4% | 542, 761, 322 | 2.4 | 0.5% | 542, 978, 322 | 6.1 | 0.7% | 9 |
| 41 | FLT1 | 863 | 103, 323 | 7.6 | 1.1% | 543, 762, 323 | 10.2 | 3.3% | 543, 979, 323 | 29.2 | 8.1% | 12 |
| 42 | FLT1 | 906 | 104, 324 | 10.0 | 2.4% | 544, 763, 324 | 10.8 | 0.8% | 544, 980, 324 | 12.4 | 2.1% | 12 |
| 43 | FLT1 | 993 | 105, 325 | 12.2 | 2.5% | 545, 764, 325 | 13.7 | 2.8% | 545, 981, 325 | 20.0 | 11.3% | 13 |
| 44 | FLT1 | 1283 | 106, 326 | 19.6 | 4.5% | 546, 765, 326 | 25.8 | 7.3% | 546, 982, 326 | 18.7 | 6.5% | 12 |
| 45 | FLT1 | 1289 | 107, 327 | 15.5 | 2.0% | 547, 766, 327 | 13.5 | 1.6% | 547, 983, 327 | 22.5 | 5.0% | 12 |
| 46 | FLT1 | 1349 | 108, 328 | 36.8 | 4.2% | 548, 767, 328 | 22.9 | 4.0% | 548, 984, 328 | 52.7 | 5.4% | 14 |
| 47 | FLT1 | 1354 | 109, 329 | 36.6 | 4.0% | 549, 768, 329 | 49.7 | 5.9% | 549, 985, 329 | 45.8 | 9.3% | 14 |
| 48 | FLT1 | 1448 | 110, 330 | 9.3 | 2.5% | 550, 769, 330 | 16.1 | 2.9% | 550, 986, 330 | 24.2 | 3.6% | 13 |
| 49 | FLT1 | 1459 | 111, 331 | 13.7 | 3.6% | 551, 770, 331 | 20.0 | 8.7% | 551, 987, 331 | 22.4 | 4.4% | 12 |
| 50 | FLT1 | 1700 | 112, 332 | 7.9 | 2.2% | 552, 771, 332 | 11.2 | 3.7% | 552, 988, 332 | 36.4 | 8.0% | 13 |
| 51 | FRAP1 | 7631 | 113, 333 | 9.5 | 2.7% | 553, 772, 333 | 23.3 | 4.9% | 553, 989, 333 | 61.8 | 18.3% | 13 |
| 52 | FRAP1 | 7784 | 114, 334 | 15.1 | 1.7% | 554, 773, 334 | 19.9 | 2.8% | 554, 990, 334 | 29.3 | 3.4% | 12 |
| 53 | FRAP1 | 7812 | 115, 335 | 11.9 | 2.9% | 555, 774, 335 | 14.4 | 3.2% | 555, 991, 335 | 28.3 | 12.7% | 11 |
| 54 | FRAP1 | 7853 | 116, 336 | 16.8 | 3.3% | 556, 775, 336 | 24.1 | 3.7% | 556, 992, 336 | 67.5 | 9.2% | 11 |
| 55 | FRAP1 | 8018 | 117, 337 | 41.1 | 9.1% | 557, 776, 337 | 19.8 | 3.3% | 557, 993, 337 | 41.8 | 9.6% | 12 |
| 56 | FRAP1 | 8102 | 118, 338 | 35.7 | 5.1% | 558, 777, 338 | 30.2 | 6.3% | 558, 994, 338 | 39.5 | 9.9% | 12 |
| 57 | FRAP1 | 8177 | 119, 339 | 21.2 | 3.9% | 559, 778, 339 | 33.2 | 9.3% | 559, 995, 339 | 47.3 | 12.3% | 14 |
| 58 | FRAP1 | 8348 | 120, 340 | 25.8 | 3.6% | 560, 779, 340 | 26.8 | 4.4% | 560, 996, 340 | 37.4 | 4.7% | 11 |
| 59 | FRAP1 | 8435 | 121, 341 | 41.1 | 6.7% | 561, 780, 341 | 54.1 | 9.5% | 561, 997, 341 | 74.9 | 8.5% | 12 |
| 60 | FRAP1 | 8542 | 122, 342 | 23.1 | 4.8% | 562, 781, 342 | 16.5 | 5.5% | 562, 998, 342 | 33.6 | 6.4% | 10 |
| 61 | HIF1A | 1780 | 123, 343 | 76.6 | 14.9% | 563, 782, 343 | 89.2 | 11.9% | 563, 999, 343 | 86.3 | 9.3% | 12 |
| 62 | HIF1A | 1831 | 124, 344 | 9.0 | 0.6% | 564, 783, 344 | 14.0 | 2.3% | 564, 1000, 344 | 38.2 | 8.5% | 12 |
| 63 | HIF1A | 1870 | 125, 345 | 21.4 | 4.5% | 565, 784, 345 | 21.2 | 3.3% | 565, 1001, 345 | 19.6 | 2.2% | 13 |
| 64 | HIF1A | 1941 | 126, 346 | 8.9 | 2.1% | 566, 785, 346 | 11.4 | 2.2% | 566, 1002, 346 | 11.7 | 2.5% | 12 |
| 65 | HIF1A | 2068 | 127, 347 | 7.8 | 1.5% | 567, 786, 347 | 7.0 | 1.4% | 567, 1003, 347 | 16.9 | 3.9% | 12 |
| 66 | HIF1A | 2133 | 128, 348 | 13.0 | 2.0% | 568, 787, 348 | 16.7 | 3.1% | 568, 1004, 348 | 16.3 | 3.1% | 10 |
| 67 | HIF1A | 2232 | 129, 349 | 8.6 | 2.0% | 569, 788, 349 | 17.4 | 3.6% | 569, 1005, 349 | 37.8 | 9.6% | 13 |
| 68 | HIF1A | 2273 | 130, 350 | 19.1 | 5.3% | 570, 789, 350 | 23.4 | 4.4% | 570, 1006, 350 | 20.3 | 3.4% | 12 |
| 69 | HIF1A | 2437 | 131, 351 | 8.2 | 1.4% | 571, 790, 351 | 47.7 | 11.5% | 571, 1007, 351 | 72.4 | 14.3% | 13 |
| 70 | HIF1A | 2607 | 132, 352 | 8.0 | 2.1% | 572, 791, 352 | 11.0 | 1.2% | 572, 1008, 352 | 33.6 | 6.0% | 13 |
| 71 | IL17A | 923 | 133, 353 | 5.0 | 0.6% | 573, 792, 353 | 7.3 | 0.7% | 573, 1009, 353 | 26.3 | 2.5% | 12 |
| 72 | IL17A | 962 | 134, 354 | 6.7 | 0.8% | 574, 793, 354 | 7.7 | 0.9% | 574, 1010, 354 | 8.9 | 2.0% | 13 |
| 73 | IL17A | 969 | 135, 355 | 8.9 | 1.7% | 575, 794, 355 | 17.1 | 1.6% | 575, 1011, 355 | 49.5 | 4.3% | 14 |
| 74 | IL17A | 1098 | 136, 356 | 7.2 | 1.3% | 576, 795, 356 | 10.0 | 2.4% | 576, 1012, 356 | 15.4 | 2.8% | 12 |
| 75 | IL17A | 1201 | 137, 357 | 14.1 | 2.2% | 577, 796, 357 | 13.4 | 1.1% | 577, 1013, 357 | 17.2 | 2.8% | 12 |
| 76 | IL17A | 1433 | 138, 358 | 107.1 | 9.7% | 578, 797, 358 | 111.5 | 10.4% | 578, 1014, 358 | 108.1 | 8.8% | 13 |
| 77 | IL17A | 1455 | 139, 359 | 115.4 | 11.1% | 579, 798, 359 | 120.8 | 8.7% | 579, 1015, 359 | 120.3 | 9.9% | 12 |
| 78 | IL17A | 1478 | 140, 360 | 82.7 | 6.3% | 580, 799, 360 | 87.6 | 5.0% | 580, 1016, 360 | 95.9 | 5.6% | 14 |
| 79 | IL17A | 1663 | 141, 361 | 140.2 | 7.8% | 581, 800, 361 | 125.9 | 9.8% | 581, 1017, 361 | 114.7 | 10.1% | 14 |
| 80 | IL17A | 1764 | 142, 362 | 114.3 | 9.2% | 582, 801, 362 | 109.4 | 2.9% | 582, 1018, 362 | 105.7 | 8.1% | 15 |
| 81 | IL18 | 210 | 143, 363 | 13.8 | 2.8% | 583, 802, 363 | 23.9 | 5.8% | 583, 1019, 363 | 21.4 | 5.7% | 14 |
| 82 | IL18 | 368 | 144, 364 | 22.5 | 1.8% | 584, 803, 364 | 21.0 | 2.0% | 584, 1020, 364 | 29.7 | 3.7% | 13 |
| 83 | IL18 | 479 | 145, 365 | 88.1 | 12.9% | 585, 804, 365 | 66.3 | 9.8% | 585, 1021, 365 | 80.0 | 16.8% | 14 |
| 84 | IL18 | 508 | 146, 366 | 8.0 | 1.9% | 586, 805, 366 | 15.7 | 3.5% | 586, 1022, 366 | 17.0 | 5.7% | 12 |
| 85 | IL18 | 521 | 147, 367 | 9.9 | 2.1% | 587, 806, 367 | 10.8 | 2.1% | 587, 1023, 367 | 18.4 | 3.3% | 11 |
| 86 | IL18 | 573 | 148, 368 | 18.6 | 4.7% | 588, 807, 368 | 24.8 | 7.6% | 588, 1024, 368 | 48.8 | 7.7% | 14 |
| 87 | IL18 | 605 | 149, 369 | 27.5 | 6.1% | 589, 808, 369 | 21.3 | 3.9% | 589, 1025, 369 | 14.9 | 2.7% | 13 |
| 88 | IL18 | 663 | 150, 370 | 5.3 | 1.0% | 590, 809, 370 | 8.2 | 1.5% | 590, 1026, 370 | 11.7 | 3.4% | 12 |
| 89 | IL18 | 785 | 151, 371 | 8.6 | 1.0% | 591, 810, 371 | 11.7 | 2.8% | 591, 1027, 371 | 21.1 | 9.1% | 12 |
| 90 | IL18 | 918 | 152, 372 | 13.9 | 1.6% | 592, 811, 372 | 15.0 | 3.0% | 592, 1028, 372 | 30.4 | 3.6% | 11 |
| 91 | IL6 | 24 | 153, 373 | 22.6 | 1.7% | 593, 812, 373 | 45.7 | 7.8% | 593, 1029, 373 | 47.8 | 4.5% | 13 |
| 92 | IL6 | 74 | 154, 374 | 52.5 | 12.6% | 594, 813, 374 | 56.4 | 7.1% | 594, 1030, 374 | 88.3 | 15.5% | 12 |
| 93 | IL6 | 160 | 155, 375 | 49.8 | 7.8% | 595, 814, 375 | 50.6 | 6.1% | 595, 1031, 375 | 68.3 | 9.4% | 14 |
| 94 | IL6 | 370 | 156, 376 | 44.7 | 8.2% | 596, 815, 376 | 52.5 | 4.2% | 596, 1032, 376 | 74.3 | 9.3% | 13 |
| 95 | IL6 | 451 | 157, 377 | 39.3 | 5.0% | 597, 816, 377 | 35.6 | 4.1% | 597, 1033, 377 | 66.6 | 7.1% | 13 |
| 96 | IL6 | 481 | 158, 378 | 68.3 | 8.1% | 598, 817, 378 | 78.7 | 15.6% | 598, 1034, 378 | 63.2 | 6.2% | 11 |
| 97 | IL6 | 710 | 159, 379 | 29.2 | 4.2% | 599, 818, 379 | 32.0 | 4.1% | 599, 1035, 379 | 77.3 | 11.4% | 12 |
| 98 | IL6 | 822 | 160, 380 | 73.7 | 11.0% | 600, 819, 380 | 72.2 | 11.6% | 600, 1036, 380 | 85.2 | 13.3% | 12 |
| 99 | IL6 | 836 | 161, 381 | 98.8 | 21.8% | 601, 820, 381 | 95.0 | 13.2% | 601, 1037, 381 | 90.5 | 15.6% | 13 |
| 100 | IL6 | 960 | 162, 382 | 31.1 | 4.4% | 602, 821, 382 | 20.5 | 6.1% | 602, 1038, 382 | 25.6 | 2.4% | 12 |
| 101 | MAP2K1 | 1237 | 163, 383 | 21.0 | 3.3% | 603, 822, 383 | 27.9 | 3.8% | 603, 1039, 383 | 50.0 | 8.8% | 11 |
| 102 | MAP2K1 | 1342 | 164, 384 | 3.9 | 0.5% | 604, 823, 384 | 8.7 | 1.5% | 604, 1040, 384 | 11.4 | 1.3% | 13 |
| 103 | MAP2K1 | 1501 | 165, 385 | 12.9 | 1.9% | 605, 824, 385 | 19.4 | 2.9% | 605, 1041, 385 | 19.7 | 5.3% | 12 |
| 104 | MAP2K1 | 1542 | 166, 386 | 7.2 | 1.3% | 606, 825, 386 | 11.7 | 2.1% | 606, 1042, 386 | 18.7 | 3.2% | 11 |
| 105 | MAP2K1 | 1544 | 167, 387 | 13.1 | 2.1% | 607, 826, 387 | 11.1 | 1.1% | 607, 1043, 387 | 16.5 | 3.0% | 10 |
| 106 | MAP2K1 | 1728 | 168, 388 | 11.9 | 1.7% | 608, 827, 388 | 11.9 | 1.0% | 608, 1044, 388 | 27.9 | 4.3% | 13 |
| 107 | MAP2K1 | 1777 | 169, 389 | 18.3 | 2.8% | 609, 828, 389 | 37.2 | 4.3% | 609, 1045, 389 | 64.5 | 8.5% | 13 |
| 108 | MAP2K1 | 1892 | 170, 390 | 34.5 | 4.7% | 610, 829, 390 | 37.6 | 6.8% | 610, 1046, 390 | 42.4 | 7.3% | 12 |
| 109 | MAP2K1 | 1954 | 171, 391 | 4.6 | 0.5% | 611, 830, 391 | 4.2 | 0.5% | 611, 1047, 391 | 6.5 | 1.1% | 13 |
| 110 | MAP2K1 | 2062 | 172, 392 | 10.2 | 0.8% | 612, 831, 392 | 10.4 | 2.9% | 612, 1048, 392 | 12.2 | 2.0% | 12 |
| 111 | MAPK1 | 3683 | 173, 393 | 7.0 | 0.9% | 613, 614, 393 | 24.4 | 17.3% | 613, 1049, 393 | 25.2 | 2.6% | 12 |
| 112 | MAPK1 | 3695 | 174, 394 | 32.9 | 4.6% | 614, 832, 394 | 30.9 | 4.0% | 614, 1050, 394 | 33.8 | 3.1% | 13 |
| 113 | MAPK1 | 3797 | 175, 395 | 7.4 | 1.1% | 615, 833, 395 | 6.4 | 1.3% | 615, 1051, 395 | 40.4 | 5.8% | 11 |
| 114 | MAPK1 | 3905 | 176, 396 | 8.0 | 1.0% | 616, 834, 396 | 8.1 | 0.5% | 616, 1052, 396 | 14.8 | 1.4% | 12 |
| 115 | MAPK1 | 3916 | 177, 397 | 11.0 | 1.7% | 617, 835, 397 | 16.0 | 3.3% | 617, 1053, 397 | 45.5 | 8.1% | 10 |
| 116 | MAPK1 | 3943 | 178, 398 | 6.8 | 0.8% | 618, 836, 398 | 6.6 | 0.7% | 618, 1054, 398 | 11.0 | 2.3% | 10 |
| 117 | MAPK1 | 4121 | 179, 399 | 7.6 | 1.1% | 619, 837, 399 | 12.7 | 1.6% | 619, 1055, 399 | 25.1 | 3.1% | 12 |
| 118 | MAPK1 | 4256 | 180, 400 | 27.6 | 2.5% | 620, 838, 400 | 36.8 | 4.0% | 620, 1056, 400 | 57.7 | 7.0% | 13 |
| 119 | MAPK1 | 4294 | 181, 401 | 31.0 | 3.0% | 621, 839, 401 | 22.3 | 3.6% | 621, 1057, 401 | 50.9 | 4.6% | 12 |
| 120 | MAPK1 | 4375 | 182, 402 | 10.9 | 1.1% | 622, 840, 402 | 12.4 | 1.4% | 622, 1058, 402 | 16.9 | 2.7% | 11 |
| 121 | MAPK14 | 2715 | 183, 403 | 11.4 | 2.8% | 623, 841, 403 | 16.5 | 4.1% | 623, 1059, 403 | 16.6 | 2.4% | 12 |
| 122 | MAPK14 | 2737 | 184, 404 | 7.5 | 0.8% | 624, 842, 404 | 10.3 | 1.1% | 624, 1060, 404 | 13.1 | 1.2% | 11 |
| 123 | MAPK14 | 2750 | 185, 405 | 8.7 | 1.0% | 625, 843, 405 | 12.2 | 1.8% | 625, 1061, 405 | 15.8 | 1.9% | 13 |
| 124 | MAPK14 | 2817 | 186, 406 | 6.4 | 0.8% | 626, 844, 406 | 14.6 | 1.7% | 626, 1062, 406 | 19.4 | 2.0% | 11 |
| 125 | MAPK14 | 3091 | 187, 407 | 9.9 | 0.6% | 627, 845, 407 | 10.3 | 1.3% | 627, 1063, 407 | 24.7 | 1.5% | 11 |
| 126 | MAPK14 | 3312 | 188, 408 | 20.4 | 1.8% | 628, 846, 408 | 30.5 | 2.9% | 628, 1064, 408 | 38.5 | 3.4% | 13 |
| 127 | MAPK14 | 3346 | 189, 409 | 20.9 | 1.6% | 629, 847, 409 | 23.0 | 2.6% | 629, 1065, 409 | 58.3 | 6.7% | 11 |
| 128 | MAPK14 | 3531 | 190, 410 | 42.4 | 3.2% | 630, 848, 410 | 55.1 | 5.0% | 630, 1066, 410 | 61.9 | 3.6% | 12 |
| 129 | MAPK14 | 3621 | 191, 411 | 28.6 | 1.9% | 631, 849, 411 | 42.4 | 13.5% | 631, 1067, 411 | 71.9 | 5.2% | 11 |
| 130 | MAPK14 | 3680 | 192, 412 | 15.6 | 1.3% | 632, 850, 412 | 15.5 | 1.9% | 632, 1068, 412 | 19.8 | 2.1% | 12 |
| 131 | PDGFA | 1322 | 193, 413 | 23.7 | 3.6% | 633, 851, 413 | 31.6 | 4.3% | 633, 1069, 413 | 38.4 | 3.3% | 12 |
| 132 | PDGFA | 1332 | 194, 414 | 35.5 | 5.4% | 634, 852, 414 | 48.4 | 3.0% | 634, 1070, 414 | 65.4 | 10.5% | 14 |
| 133 | PDGFA | 1395 | 195, 415 | 25.9 | 3.3% | 635, 853, 415 | 40.2 | 6.0% | 635, 1071, 415 | 55.2 | 9.8% | 14 |
| 134 | PDGFA | 1669 | 196, 416 | 40.4 | 5.1% | 636, 854, 416 | 29.5 | 4.3% | 636, 1072, 416 | 33.9 | 5.9% | 12 |
| 135 | PDGFA | 1676 | 197, 417 | 27.1 | 2.5% | 637, 855, 417 | 36.8 | 4.5% | 637, 1073, 417 | 47.4 | 3.4% | 13 |
| 136 | PDGFA | 1748 | 198, 418 | 27.4 | 4.7% | 638, 856, 418 | 34.5 | 5.0% | 638, 1074, 418 | 47.5 | 4.7% | 11 |
| 137 | PDGFA | 2020 | 199, 419 | 31.6 | 6.6% | 639, 857, 419 | 37.5 | 4.3% | 639, 1075, 419 | 51.9 | 5.0% | 13 |
| 138 | PDGFA | 2021 | 200, 420 | 16.7 | 1.0% | 640, 858, 420 | 24.2 | 3.1% | 640, 1076, 420 | 62.6 | 6.9% | 14 |
| 139 | PDGFA | 2030 | 201, 421 | 38.7 | 6.2% | 641, 859, 421 | 47.0 | 10.5% | 641, 1077, 421 | 80.5 | 7.6% | 13 |
| 140 | PDGFA | 2300 | 202, 422 | 55.3 | 7.7% | 642, 860, 422 | 41.2 | 4.7% | 642, 1078, 422 | 71.7 | 9.1% | 15 |
| 141 | PDGFRA | 4837 | 203, 423 | 16.9 | 3.1% | 643, 861, 423 | 21.1 | 5.1% | 643, 1079, 423 | 23.1 | 4.8% | 12 |
| 142 | PDGFRA | 4900 | 204, 424 | 23.8 | 3.8% | 644, 862, 424 | 40.9 | 8.4% | 644, 1080, 424 | 62.5 | 12.5% | 16 |
| 143 | PDGFRA | 5007 | 205, 425 | 52.6 | 9.4% | 645, 863, 425 | 49.6 | 7.7% | 645, 1081, 425 | 47.0 | 9.5% | 12 |
| 144 | PDGFRA | 5043 | 206, 426 | 30.1 | 7.9% | 646, 864, 426 | 30.0 | 5.4% | 646, 1082, 426 | 57.3 | 7.8% | 11 |
| 145 | PDGFRA | 5082 | 207, 427 | 8.3 | 1.1% | 647, 865, 427 | 11.9 | 1.8% | 647, 1083, 427 | 18.2 | 4.0% | 13 |
| 146 | PDGFRA | 5352 | 208, 428 | 6.3 | 1.4% | 648, 866, 428 | 8.2 | 1.6% | 648, 1084, 428 | 7.9 | 1.1% | 12 |
| 147 | PDGFRA | 5367 | 209, 429 | 19.1 | 5.6% | 649, 867, 429 | 10.9 | 1.6% | 649, 1085, 429 | 25.1 | 2.9% | 14 |
| 148 | PDGFRA | 5496 | 210, 430 | 18.9 | 5.4% | 650, 868, 430 | 17.0 | 2.9% | 650, 1086, 430 | 17.8 | 4.0% | 12 |
| 149 | PDGFRA | 5706 | 211, 431 | 24.5 | 4.0% | 651, 869, 431 | 47.8 | 4.3% | 651, 1087, 431 | 50.6 | 5.5% | 13 |
| 150 | PDGFRA | 5779 | 212, 432 | 13.0 | 1.4% | 652, 870, 432 | 14.0 | 2.1% | 652, 1088, 432 | 17.2 | 4.3% | 14 |
| 151 | PIK3CA | 213 | 213, 433 | 4.3 | 1.0% | 653, 871, 433 | 3.7 | 0.6% | 653, 1089, 433 | 5.7 | 0.9% | 12 |
| 152 | PIK3CA | 389 | 214, 434 | 5.3 | 1.0% | 654, 872, 434 | 7.0 | 1.5% | 654, 1090, 434 | 5.6 | 1.5% | 10 |
| 153 | PIK3CA | 517 | 215, 435 | 9.6 | 1.1% | 655, 873, 435 | 11.5 | 2.1% | 655, 1091, 435 | 13.5 | 1.6% | 11 |
| 154 | PIK3CA | 630 | 216, 436 | 6.1 | 1.2% | 656, 874, 436 | 8.9 | 2.6% | 656, 1092, 436 | 9.3 | 1.8% | 12 |
| 155 | PIK3CA | 680 | 217, 437 | 3.8 | 0.3% | 657, 875, 437 | 5.9 | 0.6% | 657, 1093, 437 | 6.9 | 1.0% | 11 |
| 156 | PIK3CA | 732 | 218, 438 | 5.7 | 1.7% | 658, 876, 438 | 15.3 | 1.5% | 658, 1094, 438 | 17.4 | 4.0% | 11 |
| 157 | PIK3CA | 736 | 219, 439 | 5.9 | 0.9% | 659, 877, 439 | 7.8 | 1.1% | 659, 1095, 439 | 6.5 | 1.4% | 12 |
| 158 | PIK3CA | 923 | 220, 440 | 5.0 | 0.7% | 660, 878, 440 | 8.5 | 1.5% | 660, 1096, 440 | 7.4 | 0.6% | 12 |
| 159 | PIK3CA | 1087 | 221, 441 | 8.1 | 2.3% | 661, 879, 441 | 8.5 | 1.6% | 661, 1097, 441 | 17.5 | 4.9% | 12 |
| 160 | PIK3CA | 1094 | 222, 442 | 13.0 | 3.8% | 662, 880, 442 | 13.0 | 2.5% | 662, 1098, 442 | 30.1 | 6.4% | 11 |
| 161 | PKN3 | 2408 | 223, 443 | 9.4 | 2.1% | 663, 881, 443 | 15.2 | 3.7% | 663, 665, 443 | 32.1 | 6.6% | 12 |
| 162 | PKN3 | 2420 | 224, 444 | 14.5 | 1.7% | 664, 882, 444 | 30.4 | 7.5% | 664, 1099, 444 | 40.1 | 6.7% | 12 |
| 163 | PKN3 | 2421 | 225, 445 | 15.2 | 2.0% | 665, 883, 445 | 20.6 | 2.7% | 665, 1100, 445 | 50.8 | 7.8% | 12 |
| 164 | PKN3 | 2425 | 226, 446 | 28.4 | 3.8% | 666, 884, 446 | 27.0 | 6.9% | 666, 1101, 446 | 36.2 | 4.8% | 15 |
| 165 | PKN3 | 2682 | 227, 447 | 30.0 | 4.6% | 667, 885, 447 | 27.1 | 2.8% | 667, 1102, 447 | 37.1 | 6.2% | 11 |
| 166 | PKN3 | 2683 | 228, 448 | 22.4 | 2.8% | 668, 886, 448 | 34.8 | 2.2% | 668, 1103, 448 | 51.9 | 7.4% | 12 |
| 167 | PKN3 | 2931 | 229, 449 | 35.1 | 4.4% | 669, 887, 449 | 57.3 | 7.8% | 669, 1104, 449 | 88.6 | 7.1% | 13 |
| 168 | PKN3 | 3063 | 230, 450 | 21.8 | 3.1% | 670, 888, 450 | 28.6 | 8.5% | 670, 1105, 450 | 40.5 | 6.2% | 12 |
| 169 | PKN3 | 3314 | 231, 451 | 9.7 | 1.8% | 671, 889, 451 | 12.0 | 1.4% | 671, 1106, 451 | 17.3 | 1.3% | 10 |
| 170 | PKN3 | 3315 | 232, 452 | 10.1 | 1.3% | 672, 890, 452 | 15.3 | 2.8% | 672, 1107, 452 | 37.4 | 3.6% | 11 |
| 171 | RAF1 | 1509 | 233, 453 | 46.2 | 9.4% | 673, 891, 453 | 51.3 | 10.7% | 673, 1108, 453 | 61.3 | 4.4% | 12 |
| 172 | RAF1 | 1512 | 234, 454 | 40.1 | 9.7% | 674, 892, 454 | 34.5 | 5.6% | 674, 1109, 454 | 62.4 | 8.6% | 13 |
| 173 | RAF1 | 1628 | 235, 455 | 48.3 | 7.9% | 675, 893, 455 | 47.4 | 7.1% | 675, 1110, 455 | 41.1 | 5.1% | 12 |
| 174 | RAF1 | 1645 | 236, 456 | 38.9 | 2.3% | 676, 894, 456 | 62.1 | 9.0% | 676, 1111, 456 | 85.0 | 9.3% | 13 |
| 175 | RAF1 | 1780 | 237, 457 | 22.6 | 4.9% | 677, 895, 457 | 24.8 | 5.3% | 677, 1112, 457 | 37.6 | 10.4% | 12 |
| 176 | RAF1 | 1799 | 238, 458 | 23.2 | 3.1% | 678, 896, 458 | 43.6 | 7.6% | 678, 1113, 458 | 50.7 | 6.2% | 12 |
| 177 | RAF1 | 1807 | 239, 459 | 28.0 | 5.4% | 679, 897, 459 | 34.8 | 5.8% | 679, 1114, 459 | 37.0 | 5.3% | 15 |
| 178 | RAF1 | 1863 | 240, 460 | 28.2 | 3.1% | 680, 898, 460 | 38.1 | 4.5% | 680, 1115, 460 | 35.7 | 4.2% | 14 |
| 179 | RAF1 | 2157 | 241, 461 | 68.8 | 6.5% | 681, 899, 461 | 64.1 | 8.0% | 681, 1116, 461 | 86.7 | 12.6% | 14 |
| 180 | RAF1 | 2252 | 242, 462 | 11.4 | 1.7% | 682, 900, 462 | 25.8 | 5.4% | 682, 1117, 462 | 71.2 | 10.7% | 13 |
| 181 | SRD5A1 | 1150 | 243, 463 | 3.7 | 0.5% | 683, 901, 463 | 4.4 | 0.7% | 683, 1118, 463 | 3.8 | 0.4% | 12 |
| 182 | SRD5A1 | 1153 | 244, 464 | 3.2 | 0.4% | 684, 902, 464 | 5.2 | 0.5% | 684, 1119, 464 | 7.0 | 0.9% | 12 |
| 183 | SRD5A1 | 1845 | 245, 465 | 3.9 | 0.5% | 685, 903, 465 | 4.5 | 0.6% | 685, 1120, 465 | 7.4 | 0.8% | 13 |
| 184 | SRD5A1 | 1917 | 246, 466 | 9.4 | 0.8% | 686, 904, 466 | 10.2 | 1.3% | 686, 1121, 466 | 22.0 | 2.8% | 12 |
| 185 | SRD5A1 | 1920 | 247, 467 | 4.6 | 0.3% | 687, 905, 467 | 4.9 | 1.0% | 687, 1122, 467 | 6.4 | 0.5% | 11 |
| 186 | SRD5A1 | 1964 | 248, 468 | 6.2 | 0.7% | 688, 906, 468 | 10.4 | 0.7% | 688, 1123, 468 | 21.0 | 4.6% | 10 |
| 187 | SRD5A1 | 1981 | 249, 469 | 6.5 | 1.0% | 689, 907, 469 | 7.1 | 0.7% | 689, 1124, 469 | 8.8 | 1.5% | 12 |
| 188 | SRD5A1 | 2084 | 250, 470 | 16.9 | 1.1% | 690, 908, 470 | 15.7 | 1.5% | 690, 1125, 470 | 13.3 | 1.5% | 12 |
| 189 | SRD5A1 | 2085 | 251, 471 | 17.3 | 1.6% | 691, 909, 471 | 19.4 | 1.7% | 691, 1126, 471 | 20.8 | 2.6% | 12 |
| 190 | SRD5A1 | 2103 | 252, 472 | 7.5 | 1.3% | 692, 910, 472 | 10.9 | 1.2% | 692, 1127, 472 | 12.3 | 1.7% | 12 |
| 191 | TNF | 32 | 253, 473 | 71.4 | 13.2% | 693, 911, 473 | 93.7 | 14.9% | 693, 1128, 473 | 122.6 | 21.1% | 12 |
| 192 | TNF | 649 | 254, 474 | 100.0 | 16.3% | 694, 912, 474 | 127.7 | 12.6% | 694, 1129, 474 | 147.9 | 21.7% | 12 |
| 193 | TNF | 802 | 255, 475 | 67.2 | 10.7% | 695, 913, 475 | 64.0 | 6.6% | 695, 1130, 475 | 116.4 | 21.0% | 12 |
| 194 | TNF | 875 | 256, 476 | 101.7 | 19.9% | 696, 914, 476 | 99.3 | 15.5% | 696, 1131, 476 | 108.8 | 14.2% | 12 |
| 195 | TNF | 983 | 257, 477 | 94.5 | 7.0% | 697, 915, 477 | 83.1 | 7.3% | 697, 1132, 477 | 140.6 | 20.4% | 11 |
| 196 | TNF | 987 | 258, 478 | 82.0 | 10.9% | 698, 916, 478 | 139.4 | 8.2% | 698, 1133, 478 | 143.8 | 9.2% | 10 |
| 197 | TNF | 992 | 259, 479 | 126.7 | 15.8% | 699, 700, 479 | 121.7 | 10.8% | 699, 1134, 479 | 115.9 | 16.4% | 11 |
| 198 | TNF | 1003 | 260, 480 | 123.4 | 16.7% | 700, 917, 480 | 114.4 | 47.8% | 700, 1135, 480 | 98.5 | 17.2% | 14 |
| 199 | TNF | 1630 | 261, 481 | 58.0 | 5.7% | 701, 918, 481 | 56.1 | 9.4% | 701, 1136, 481 | 71.0 | 17.2% | 11 |
| 200 | TNF | 1631 | 262, 482 | 54.2 | 13.4% | 702, 919, 482 | 63.9 | 10.1% | 702, 1137, 482 | 73.8 | 14.8% | 11 |
| 201 | TNFSF13B | 188 | 263, 483 | 20.4 | 3.2% | 703, 920, 483 | 46.2 | 11.9% | 703, 1138, 483 | 58.4 | 12.7% | 13 |
| 202 | TNFSF13B | 313 | 264, 484 | 15.9 | 5.1% | 704, 921, 484 | 18.9 | 7.4% | 704, 1139, 484 | 48.0 | 8.1% | 12 |
| 203 | TNFSF13B | 337 | 265, 485 | 22.3 | 4.6% | 705, 922, 485 | 37.1 | 11.0% | 705, 1140, 485 | 63.6 | 10.4% | 12 |
| 204 | TNFSF13B | 590 | 266, 486 | 35.8 | 8.7% | 706, 923, 486 | 49.4 | 11.0% | 706, 1141, 486 | 50.7 | 10.3% | 10 |
| 205 | TNFSF13B | 652 | 267, 487 | 21.3 | 7.2% | 707, 924, 487 | 57.6 | 16.7% | 707, 1142, 487 | 78.8 | 5.6% | 14 |
| 206 | TNFSF13B | 661 | 268, 488 | 28.8 | 3.0% | 708, 925, 488 | 38.3 | 8.4% | 708, 1143, 488 | 56.5 | 16.3% | 12 |
| 207 | TNFSF13B | 684 | 269, 489 | 46.3 | 7.2% | 709, 926, 489 | 43.8 | 9.7% | 709, 1144, 489 | 54.5 | 4.6% | 12 |
| 208 | TNFSF13B | 905 | 270, 490 | 18.5 | 5.0% | 710, 927, 490 | 27.9 | 3.1% | 710, 1145, 490 | 51.7 | 10.9% | 12 |
| 209 | TNFSF13B | 961 | 271, 491 | 21.4 | 4.0% | 711, 928, 491 | 37.5 | 10.1% | 711, 1146, 491 | 77.6 | 11.2% | 14 |
| 210 | TNFSF13B | 1150 | 272, 492 | 24.1 | 7.0% | 712, 929, 492 | 23.4 | 5.7% | 712, 1147, 492 | 35.9 | 8.0% | 13 |
| 211 | VEGFA | 1426 | 273, 493 | 14.5 | 2.2% | 713, 930, 493 | 18.1 | 3.2% | 713, 1148, 493 | 21.0 | 3.8% | 13 |
| 212 | VEGFA | 1428 | 274, 494 | 18.5 | 2.6% | 714, 931, 494 | 32.1 | 5.8% | 714, 1149, 494 | 46.7 | 9.4% | 12 |
| 213 | VEGFA | 1603 | 275, 495 | 14.6 | 2.1% | 715, 932, 495 | 36.6 | 17.5% | 715, 1150, 495 | 65.6 | 6.9% | 13 |
| 214 | VEGFA | 1685 | 276, 496 | 17.1 | 1.3% | 716, 933, 496 | 20.2 | 5.5% | 716, 1151, 496 | 23.4 | 3.8% | 13 |
| 215 | VEGFA | 1792 | 277, 497 | 17.0 | 1.8% | 717, 934, 497 | 21.2 | 3.2% | 717, 1152, 497 | 39.5 | 6.3% | 12 |
| 216 | VEGFA | 2100 | 278, 498 | 116.9 | 11.5% | 718, 935, 498 | 103.6 | 7.5% | 718, 1153, 498 | 101.5 | 12.9% | 12 |
| 217 | VEGFA | 2102 | 279, 499 | 116.3 | 9.1% | 719, 936, 499 | 110.2 | 9.3% | 719, 1154, 499 | 105.0 | 8.0% | 12 |
| 218 | VEGFA | 2196 | 280, 500 | 24.2 | 2.7% | 720, 937, 500 | 26.6 | 3.1% | 720, 1155, 500 | 43.5 | 3.5% | 12 |
| 219 | VEGFA | 2261 | 281, 501 | 15.6 | 2.2% | 721, 938, 501 | 44.2 | 6.2% | 721, 1156, 501 | 109.0 | 9.8% | 12 |
| 220 | VEGFA | 2292 | 282, 502 | 48.4 | 4.3% | 722, 939, 502 | 45.1 | 7.2% | 722, 1157, 502 | 80.7 | 6.7% | 15 |

*All samples were normalized to the respective dsRNA QNeg (Qiagen) negative control samples run in the same experiment. That is, QNeg values were set as 100% active (i.e., no knockdown), with 95% confidence intervals (CI) ranging from 6.3-22.5%. As a positive control, an siRNA specific for rLuc was used, which samples showed on average expression levels that varied from 1.2% to 16.8% (i.e., about 83% to about 99% knockdown activity and a 95% CI ranging from 0.3% to 13.7%).
†“Pos” refers to the position on the target gene mRNA message that aligns with the 5′-end of the dsRNA sense strand. The mRNA numbering is based on the GenBank accession numbers as described herein.
‡The SEQ ID NOS. are provided in the following order: (1) Dicer: sense strand, antisense strand; (2) Nicked: 5′-sense strand fragment, 3′-sense strand fragment, and antisense strand; and (3) Gapped: 5′-sense strand fragment, 3′-sense strand fragment, and antisense strand. The Dicer dsRNA has two strands, while ndsRNA and gdsRNA have three strands each. The nicked or gapped sense strand fragments have three locked nucleic acids each.
\hat{ }“Length 5′-S” refers to the length of the 5′-sense strand fragment of the nicked or gapped mdRNA, which indicates the position of the nick (e.g., 10 means the nick is between position 10 and 11, so the 5′sense strand fragment is 10 nucleotides long and the 3′-sense strand fragment is 15 nucelotides long) or one nucleotide gap (e.g., 10 means the missing nucleotide is number 11, so the 5′sense strand fragment is 10 nucleotides long andthe 3′-sense strand fragment is 14 nucelotides long).

### Example 2

### Knockdown of β-Galactosidase Activity by Gapped dsRNA Dicer Substrate

[0189] The activity of a Dicer substrate dsRNA containing a gap in the double-stranded structure in silencing LacZ mRNA as compared to the normal Dicer substrate dsRNA (i.e., not having a gap) was examined.

Nucleotide Sequences of dsRNA and mdRNA Targeting LacZ mRNA

[0190] The nucleic acid sequence of the one or more sense strands, and the antisense strand of the dsRNA and gapped dsRNA (also referred to herein as a meroduplex or mdRNA) are shown below and were synthesized using standard techniques. The RISC activator LacZ dsRNA comprises a 21 nucleotide sense strand and a 21 nucleotide antisense strand, which can anneal to form a double-stranded region of 19 base pairs with a two deoxythymidine overhang on each strand (referred to as 21/21 dsRNA).

LacZ dsRNA (21/21)-RISC Activator

(SEQ ID NO:1)

| | |
|---|---|
| Sense | 5′-CUACACAAAUCAGCGAUUUdTdT-3′ |

(SEQ ID NO:2)

| | |
|---|---|
| Antisense | 3′-dTdTGAUGUGUUUAGUCGCUAAA-5′ |

[0191] The Dicer substrate LacZ dsRNA comprises a 25 nucleotide sense strand and a 27 nucleotide antisense strand, which can anneal to form a double-stranded region of 25 base pairs with one blunt end and a cytidine and uridine overhang on the other end (referred to as 25/27 dsRNA).

LacZ dsRNA (25/27)-Dicer Substrate

(SEQ ID NO:3)

| | |
|---|---|
| Sense | 5′-CUACACAAAUCAGCGAUUUCCAUdGdT-3′ |

(SEQ ID NO:4)

| | |
|---|---|
| Antisense | 3′-CUGAUGUGUUUAGUCGCUAAAGGUA C A -5′ |

The LacZ mdRNA comprises two sense strands of 13 nucleotides (5′-portion) and 11 nucleotides (3′-portion) and a 27 nucleotide antisense strand, which three strands can anneal to form two double-stranded regions of 13 and 11 base pairs separated by a single nucleotide gap (referred to as a 13, 11/27 mdRNA). The 5′-end of the 11 nucleotide sense strand fragment may be optionally phosphorylated. The “*” indicates a gap—in this case, a single nucleotide gap (i.e., a cytidine is missing).

LacZ mdRNA (13, 11/27)-Dicer Substrate

(SEQ ID NOS:5, 6)

| | |
|---|---|
| Sense | 5′-CUACACAAAUCAG*GAUUUCCAUdGdT-3′ |

(SEQ ID NO:4)

| | |
|---|---|
| Antisense | 3′-CUGAUGUGUUUAGUCGCUAAAGGUA C A -5′ |

Each of the LacZ dsRNA or mdRNA was used to transfect 9lacZ/R cells.

### Transfection

[0192] Six well collagen-coated plates were seeded with 5×10⁵ 9lacZ/R cells/well in a 2 ml volume per well, and incubated overnight at 37° C./5% CO₂ in DMEM/high glucose media. Preparation for transfection: 250 μl of OPTIMEM media without serum was mixed with 5 μl of 20 pmol/μl dsRNA and 5 μl of HIPERFECT transfection solution (Qiagen) was mixed with another 250 μl OPTIMEM media. After both mixtures were allowed to equilibrate for 5 minutes, the RNA and transfection solutions were combined and left at room temperature for 20 minutes to form transfection complexes. The final concentration of HIPERFECT was 50 μM, and the dsRNAs were tested at 0.05 nM, 0.1 nM, 0.2 nM, 0.5 nM, 1 nM, 2 nM, 5 nM, and 10 nM, while the mdRNA was tested at 0.2 nM, 0.5 nM, 1 nM, 2 nM, 5 nM, 10 nM, 20 nM, and 50 nM. Complete media was removed, the cells were washed with incomplete OPTIMEM, and then 500 μl transfection mixture was applied to the cells, which were incubated with gentle shaking at 37° C. for 4 hours. After transfecting, the transfection media was removed, cells were washed once with complete DMEM/high glucose media, fresh media added, and the cells were then incubated for 48 hours at 37° C., 5% CO₂.

### β-Galactosidase Assay

[0193] Transfected cells were washed with PBS, and then detached with 0.5 ml trypsin/EDTA. The detached cells were suspended in 1 ml complete DMEM/high glucose and transferred to a clean tube. The cells were harvested by centrifugation at 250×g for 5 minutes, and then resuspended in 50 μl 1× lysis buffer at 4° C. The lysed cells were subjected to two freeze-thaw cycles on dry ice and a 37° C. water bath. The lysed samples were centrifuged for 5 minutes at 4° C. and the supernatant was recovered. For each sample, 1.5 μl and 10 μl of lysate was transferred to a clean tube and sterile water added to a final volume of 30 μl followed by the addition of 70 μl o-nitrophenyl-β-D-galactopyranose (ONPG) and 200 μl 1× cleavage buffer with β-mercaptoethanol. The samples were mixed briefly, incubated for 30 minutes at 37° C., and then 500 μl stop buffer was added (final volume 800 μl). β-Galactosidase activity for each sample was measured in disposable cuvettes at 420 nm. Protein concentration was determined by the BCA (bicinchoninic acid) method. For the purpose of the instant example, the level of measured LacZ activity was correlated with the quantity of LacZ transcript within 9L/LacZ cells. Thus, a reduction in β-galactosidase activity after dsRNA transfection, absent a negative impact on cell viability, was attributed to a reduction in the quantity of LacZ transcripts resulting from targeted degradation mediated by the LacZ dsRNA.

### Results

[0194] Knockdown activity in transfected and untransfected cells was normalized to a Qneg control dsRNA and presented as a normalized value of the Qneg control (i.e., Qneg represented 100% or “normal” gene expression levels). Both the lacZ RISC activator and Dicer substrate dsRNAs molecule showed good knockdown of β-galactosidase activity at concentration as low as 0.1 nM (FIG. 2), while the Dicer substrate antisense strand alone (single stranded 27mer) had no silencing effect. Surprisingly, a gapped mdRNA showed good knockdown although somewhat lower than that of intact RISC activator and Dicer substrate dsRNAs (FIG. 2). The presence of the gapmer cytidine (i.e., the missing nucleotide) at various concentrations (0.1 μM to 50 μM) had no effect on the activity of the mdRNA (data not shown). None of the dsRNA or mdRNA solutions showed any detectable toxicity in the transfected 9L/LacZ cells. The IC₅₀ of the lacZ mdRNA was calculated to be 3.74 nM, which is about 10 fold lower than what had been previously measured for lacZ dsRNA 21/21 (data not shown). These results show that a meroduplex (gapped dsRNA) is capable of inducing gene silencing.

### Example 3

### Knockdown of Influenza Gene Expression by Nicked DsRNA

[0195] The activity of a nicked dsRNA (21/21) in silencing influenza gene expression as compared to a normal dsRNA (i.e., not having a nick) was examined.

Nucleotide Sequences of dsRNA and mdRNA Targeting Influenza mRNA

[0196] The dsRNA and nicked dsRNA (another form of meroduplex, referred to herein as ndsRNA) are shown below and were synthesized using standard techniques. The RISC activator influenza G1498 dsRNA comprises a 21 nucleotide sense strand and a 21 nucleotide antisense strand, which can anneal to form a double-stranded region of 19 base pairs with a two deoxythymidine overhang on each strand.

G1498-wt dsRNA (21/21)

| | |
|---|---|
| Sense | 5′-GGAUCUUAUUUCUUCGGAGdTdT-3′ |

(SEQ ID NO:4)

| | |
|---|---|
| Antisense | 3′-dTdTCCUAGAAUAAAGAAGCCUC-5′ |

[0197] The RISC activator influenza G1498 dsRNA was nicked on the sense strand after nucleotide 11 to produce a ndsRNA having two sense strands of 11 nucleotides (5′-portion, italic) and 10 nucleotides (3′-portion) and a 21 nucleotide antisense strand, which three strands can anneal to form two double-stranded regions of 11 (shown in italics) and 10 base pairs separated by a one nucleotide gap (which may be referred to as G1498 11, 10/21 ndsRNA-wt). The 5′-end of the 10 nucleotide sense strand fragment may be optionally phosphorylated, as depicted by a “p” preceding the nucleotide (e.g., pC).

G1498 ndsRNA-wt (11, 10/21)

(SEQ ID NO:9, 10)

| | |
|---|---|
| Sense | 5′-GGAUCUUAUUUCUUCGGAGdTdT-3′ |

(SEQ ID NO:8)

| | |
|---|---|
| Antisense | 3′-dTdTCCUAGAAUAAAGAAGCCUC-5′ |

G1498 ndsRNA-wt (11, 10/21)

(SEQ ID NO:9, 10)

| | |
|---|---|
| Sense | 5′-GGAUCUUAUUUₚCUUCGGAGdTdT-3′ |

(SEQ ID NO:8)

| | |
|---|---|
| Antisense | 3′-dTdTCCUAGAAUAAAGAAGCCUC-5′ |

In addition, each of these G1498 dsRNAs were made with each U substituted with a 5-methyluridine (ribothymidine) and are referred to as G1498 dsRNA-rT. Each of the G1498 dsRNA or ndsRNA (meroduplex), with or without the 5-methyluridine substitution, was used to transfect HeLa S3 cells having an influenza target sequence associated with a luciferase gene. Also, the G1498 antisense strand alone or the antisense strand annealed to the 11 nucleotide sense strand portion alone or the 10 nucleotide sense strand portion alone were examined for activity.

### Transfection and Dual Luciferase Assay

[0198] The reporter plasmid psiCHECK™-2 (Promega, Madison, Wis.), which constitutively expresses both firefly luc2 (Photinus pyralis) and Renilla (Renilla reniformis, also known as sea pansy) luciferases, was used to clone in a portion of the influenza NP gene downstream of the Renilla translational stop codon that results in a Renilla-influenza NP fusion mRNA. The firefly luciferase in the psiCHECK™-2 vector is used to normalize Renilla luciferase expression and serves as a control for transfection efficiency.

[0199] Multi-well plates were seeded with HeLa S3 cells/well in 100 μl Ham's F12 medium and 10% fetal bovine serum, and incubated overnight at 37° C./5% CO₂. The HeLa S3 cells were transfected with the psiCHECK™-influenza plasmid (75 ng) and G1498 dsRNA or ndsRNA (final concentration of 10 nM or 100 nM) formulated in Lipofectamine™ 2000 and OPTIMEM reduced serum medium. The transfection mixture was incubated with the HeLa S3 cells with gentle shaking at 37° C. for about 18 to 20 hours.

[0200] After transfecting, firefly luciferase reporter activity was measured first by adding Dual-Glo™ Luciferase Reagent (Promega, Madison, Wis.) for 10 minutes with shaking, and then quantitating the luminescent signal using a VICTOR³™1420 Multilabel Counter (PerkinElmer, Waltham, Mass.). After measuring the firefly luminescence, Stop & Glo® Reagent (Promega, Madison, Wis.) was added for 10 minutes with shaking to simultaneously quench the firefly reaction and initiate the Renilla luciferase reaction, and then the Renilla luciferase luminescent signal was quantitated VICTOR³™1420 Multilabel Counter (PerkinElmer, Waltham, Mass.).

### Results

[0201] Knockdown activity in transfected and untransfected cells was normalized to a Qneg control dsRNA and presented as a normalized value of the Qneg control (i.e., Qneg represented 100% or “normal” gene expression levels). Thus, a smaller value indicates a greater knockdown effect. The G1498 dsRNA-wt and dsRNA-rT showed similar good knockdown at a 100 nM concentration (FIG. 3). Surprisingly, the G1498 ndsRNA-rT, whether phosphorylated or not, showed good knockdown although somewhat lower than the G1498 dsRNA-wt (FIG. 3). Similar results were obtained with dsRNA or ndsRNA at 10 nM (data not shown). None of the G1498 dsRNA or ndsRNA solutions showed any detectable toxicity in HeLa S3 cells at either 10 nM or 100 nM. Even the presence of only half a nicked sense strand (an 11 nucleotide or 10 nucleotide strand alone) with a G1498 antisense strand showed some detectable activity. These results show that a nicked-type meroduplex dsRNA molecule is unexpectedly capable of promoting gene silencing.

### Example 4

### Knockdown Activity of Nicked mdRNA

[0202] In this example, the activity of a dicer substrate LacZ dsRNA of Example 1 having a sense strand with a nick at various positions was examined. In addition, a dideoxy nucleotide (i.e., ddG) was incorporated at the 5′-end of the 3′-most strand of a sense sequence having a nick or a single nucleotide gap to determine whether the in vivo ligation of the nicked sense strand is “rescuing” activity. The ddG is not a substrate for ligation. Also examined was the influenza dicer substrate dsRNA of Example 7 having a sense strand with a nick at one of positions 8 to 14. The “p” designation indicates that the 5′-end of the 3′-most strand of the nicked sense influenza sequence was phosphorylated. The “L” designation indicates that the G at position 2 of the 5′-most strand of the nicked sense influenza sequence was substituted for a locked nucleic acid G. The Qneg is a negative control dsRNA.

[0203] The dual fluorescence assay of Example 3 was used to measure knockdown activity with 5 nM of the LacZ sequences and 0.5 nM of the influenza sequences. The lacZ dicer substrate (25/27, LacZ-DS) and lacZ RISC activator (21/21, LacZ) are equally active, and the LacZ-DS can be nicked in any position between 8 and 14 without affecting activity (FIG. 3). In addition, the inclusion of a ddG on the 5′-end of the 3′-most LacZ sense sequence having a nick (LacZ:DSNkd13-3′dd) or a one nucleotide gap (LacZ:DSNkd13D1-3′dd) was essentially as active as the unsubstituted sequence (FIG. 4). The influenza dicer substrate (G1498DS) nicked at any one of positions 8 to 14 was also highly active (FIG. 5). Phosphorylation of the 5′-end of the 3′-most strand of the nicked sense influenza sequence had essentially no effect on activity, but addition of a locked nucleic acid appears to improve activity.

### Example 5

### Mean Inhibitory Concentration of mdRNA

[0204] In this example, a dose response assay was performed to measure the mean inhibitory concentration (IC₅₀) of the influenza dicer substrate dsRNA of Example 8 having a sense strand with a nick at position 12, 13, or 14, including or not a locked nucleic acid. The dual luciferase assay of Example 2 was used. The influenza dicer substrate dsRNA (G1498DS) was tested at 0.0004 nM, 0.002 nM, 0.005 nM, 0.019 nM, 0.067 nM, 0.233 nM, 0.816 nM, 2.8 nM, and 10 nM, while the mdRNA with a nick at position 13 (G1498DS:Nkd13) was tested at 0.001 nM, 0.048 nM, 0.167 nM, 1 nM, 2 nM, 7 nM, and 25 nM (see FIG. 6). Also tested were RISC activator molecules (21/21) with or without a nick at various positions (including G1498DS:Nkd11, G1498DS:Nkd12, and G1498DS:Nkd14), each of the nicked versions with a locked nucleic acid as described above (data not shown). The Qneg is a negative control dsRNA.

[0205] The IC₅₀ of the RISC activator G1498 was calculated to be about 22 μM, while the dicer substrate G1498DS IC₅₀ was calculated to be about 6 pM. The IC₅₀ of RISC and Dicer mdRNAs range from about 200 pM to about 15 nM. The inclusion of a single locked nucleic acid reduced the IC₅₀ of Dicer mdRNAs by up 4 fold (data not shown). These results show that a meroduplex dsRNA having a nick or gap in any position is capable of inducing gene silencing.

### Example 6

### Knockdown Activity of Gapped mdRNA

[0206] The activity of an influenza dicer substrate dsRNA having a sense strand with a gap of differing sizes and positions was examined. The influenza dicer substrate dsRNA of Example 8 was generated with a sense strand having a gap of 0 to 6 nucleotides at position 8, a gap of 4 nucleotides at position 9, a gap of 3 nucleotides at position 10, a gap of 2 nucleotides at position 11, and a gap of 1 nucleotide at position 12 (see Table 2). The Qneg is a negative control dsRNA. Each of the mdRNAs was tested at a concentration of 5 nM (data not shown) and 10 nM. The mdRNAs have the following antisense strand 5′-CAUUGUCUCCGAAGAAAUAAGAUCCUU (SEQ ID NO:11), and nicked or gapped sense strands as shown in Table 2.

TABLE 2

| | | | | | |
|---|---|---|---|---|---|
| | | | Gap | Gap | % |
| mdRNA | 5′ Sense* (SEQ ID NO.) | 3′ Sense (SEQ ID NO.) | Pos | Size | KD^{†} |

| | | | | | |
|---|---|---|---|---|---|
| G1498:DSNkd8 | GGAUCUUA (12) | UUUCUUCGGAGACAAdTdG (13) | 8 | 0 | 67.8 |
| G1498:DSNkd8D1 | GGAUCUUA (12) | UUCUUCGGAGACAAdTdG (14) | 8 | 1 | 60.9 |
| G1498:DSNkd8D2 | GGAUCUUA (12) | UCUUCGGAGACAAdTdG (15) | 8 | 2 | 48.2 |
| G1498:DSNkd8D3 | GGAUCUUA (12) | CUUCGGAGACAAdTdG (16) | 8 | 3 | 44.1 |
| G1498:DSNkd8D4 | GGAUCUUA (12) | UUCGGAGACAAdTdG (17) | 8 | 4 | 30.8 |
| G1498:DSNkd8D5 | GGAUCUUA (12) | UCGGAGACAAdTdG (18) | 8 | 5 | 10.8 |
| G1498:DSNkd8D6 | GGAUCUUA (12) | CGGAGACAAdTdG (19) | 8 | 6 | 17.9 |
| G1498:DSNkd9D4 | GGAUCUUAU (20) | UCGGAGACAAdTdG (18) | 9 | 4 | 38.9 |
| G1498:DSNkd10D3 | GGAUCUUAUU (21) | UCGGAGACAAdTdG (18) | 10 | 3 | 38.4 |
| G1498:DSNkd11D2 | GGAUCUUAUUU (22) | UCGGAGACAAdTdG (18) | 11 | 2 | 46.2 |
| G1498:DSNkd12D1 | GGAUCUUAUUUC (23) | UCGGAGACAAdTdG (18) | 12 | 1 | 49.6 |
| Plasmid | — | — | — | — | 5.3 |

*G indicates a locked nucleic acid G in the 5′ sense strand.
^{†}% KD means percent knockdown activity.

[0207] The dual fluorescence assay of Example 2 was used to measure knockdown activity. Similar results were obtained at both the 5 nM and 10 nM concentrations. These data show that an mdRNA having a gap of up to 6 nucleotides still has activity, although having four or fewer missing nucleotides shows the best activity (see, also, FIG. 7). Thus, mdRNA having various sizes gaps that are in various different positions have knockdown activity.

[0208] To examine the general applicability of a sequence having a sense strand with a gap of differing sizes and positions, a different dsRNA sequence was tested. The lacZ RISC dsRNA of Example 1 was generated with a sense strand having a gap of 0 to 6 nucleotides at position 8, a gap of 5 nucleotides at position 9, a gap of 4 nucleotides at position 10, a gap of 3 nucleotides at position 11, a gap of 2 nucleotides at position 12, a gap of 1 nucleotide at position 12, and a nick (gap of 0) at position 14 (see Table 3). The Qneg is a negative control dsRNA. Each of the mdRNAs was tested at a concentration of 5 nM (data not shown) and 25 nM. The lacZ mdRNAs have the following antisense strand 5′-AAAUCGCUGAUUUGUGUAGdTdTUAAA (SEQ ID NO:2) and nicked or gapped sense strands as shown in Table 3.

TABLE 3

| | | | | |
|---|---|---|---|---|
| | | | Gap | Gap |
| mdRNA | 5′ Sense* (SEQ ID NO.) | 3′ Sense* (SEQ ID NO.) | Pos | Size |

| | | | | |
|---|---|---|---|---|
| LacZ:Nkd8 | CUACACAA (24) | AUCAGC GAUUUdTdT (25) | 8 | 0 |
| LacZ:Nkd8D1 | CUACACAA (24) | UCAGCGAUUUdTdT (26) | 8 | 1 |
| LacZ:Nkd8D2 | CUACACAA (24) | CAGC GAUUUdTdT (27) | 8 | 2 |
| LacZ:Nkd8D3 | CUACACAA (24) | AGC GAUUUdTdT (28) | 8 | 3 |
| LacZ:Nkd8D4 | CUACACAA (24) | GC GAUUUdTdT (29) | 8 | 4 |
| LacZ:Nkd8D5 | CUACACAA (24) | C GAUUUdTdT (30) | 8 | 5 |
| LacZ:Nkd8D6 | CUACACAA (24) | GAUUUdTdT (31) | 8 | 6 |
| LacZ:Nkd9D5 | CUACACAAA (32) | GAUUUdTdT (31) | 9 | 5 |
| LacZ:Nkd10D4 | CUACACAAAU (33) | GAUUUdTdT (31) | 10 | 4 |
| LacZ:Nkd11D3 | CUACACAAAUC (34) | GAUUUdTdT (31) | 11 | 3 |
| LacZ:Nkd12D2 | CUACACAAAUCA (35) | GAUUUdTdT (31) | 12 | 2 |
| LacZ:Nkd13D1 | CUACACAAAUCAG (36) | GAUUUdTdT (31) | 13 | 1 |
| LacZ:Nkd14 | CUACACAAAUCAGC (37) | GAUUUdTdT (31) | 14 | 0 |

*A indicates a locked nucleic acid A in each sense strand.

[0209] The dual fluorescence assay of Example 3 was used to measure knockdown activity. FIG. 8 shows that an mdRNA having a gap of up to 6 nucleotides has substantial activity and the position of the gap may affect the potency of knockdown. Thus, mdRNA having various sizes gaps that are in various different positions and in different mdRNA sequences have knockdown activity.

### Example 7

### Knockdown Activity of Substituted mMdRNA

[0210] The activity of an influenza dsRNA RISC sequences having a nicked sense strand and the sense strands having locked nucleic acid substitutions were examined. The influenza RISC sequence G1498 of Example 3 was generated with a sense strand having a nick at positions 8 to 14 counting from the 5′-end. Each sense strand was substituted with one or two locked nucleic acids as shown in Table 4. The Qneg and Plasmid are negative controls. Each of the mdRNAs was tested at a concentration of 5 nM. The antisense strand used was 5′-CUCCGAAGAAAUAAGAUCCdTdT (SEQ ID NO:8).

TABLE 4

| | | | | |
|---|---|---|---|---|
| | | | Nick | % |
| mdRNA | 5′ Sense* (SEQ ID NO.) | 3′ Sense* (SEQ ID NO.) | Pos | KD |

| | | | | |
|---|---|---|---|---|
| G1498-wt | GGAUCUUAUUUCUUCGGAGdTdT (7) | — | — | 85.8 |
| G1498-L | GGAUCUUAUUUCUUCGGAGdTdT (61) | — | — | 86.8 |
| G1498:Nkd8-1 | GGAUCUUA (12) | UUUCUUCGGAGdTdT (47) | 8 | 36.0 |
| G1498:Nkd8-2 | GGAUCUUA (40) | UUUCUUCGGAGdTdT (54) | 8 | 66.2 |
| G1498:Nkd9-1 | GGAUCUUAU (20) | UUCUUCGGAGdTdT (48) | 9 | 60.9 |
| G1498:Nkd9-2 | GGAUCUUAU (41) | UUCUUCGGAGdTdT (55) | 9 | 64.4 |
| G1498:Nkd10-1 | GGAUCUUAUU (21) | UCUUCGGAGdTdT (49) | 10 | 58.2 |
| G1498:Nkd10-2 | GGAUCUUAUU (42) | UCUUCGGAGdTdT (56) | 10 | 68.5 |
| G1498:Nkd11-1 | GGAUCUUAUUU (22) | CUUCGGAGdTdT (50) | 11 | 75.9 |
| G1498:Nkd11-2 | GGAUCUUAUUU (43) | CUUCGGAGdTdT (57) | 11 | 67.1 |
| G1498:Nkd12-1 | GGAUCUUAUUUC (23) | UUCGGAGdTdT (51) | 12 | 59.9 |
| G1498:Nkd12-2 | GGAUCUUAUUUC (44) | UUCGGAGdTdT (58) | 12 | 72.8 |
| G1498:Nkd13-1 | GGAUCUUAUUUCU (38) | UCGGAGdTdT (52) | 13 | 37.1 |
| G1498:Nkd13-2 | GGAUCUUAUUUCU (45) | UCGAGdTdT (59) | 13 | 74.3 |
| G1498:Nkd14-1 | GGUCUUAUUUCUU (39) | CGGAGdTdT (53) | 14 | 29.0 |
| G1498:Nkd14-2 | GGAUCUUAUUUCUU (46) | CGGAGdTdT (60) | 14 | 60.2 |
| Qneg | — | — | — | 0 |
| Plasmid | — | — | — | 3.6 |

*Nucleotides that are bold and underlined are locked nucleic acids.

[0211] The dual fluorescence assay of Example 3 was used to measure knockdown activity. These data show that increasing the number of locked nucleic acid substitutions tends to increase activity of an mdRNA having a nick at any of a number of positions. The single locked nucleic acid per sense strand appears to be most active when the nick is at position 11 (see FIG. 9). But, multiple locked nucleic acids on each sense strand make mdRNA having a nick at any position as active as the most optimal nick position with a single substitution (i.e., position 11) (FIG. 9). Thus, mdRNA having duplex stabilizing modifications make mdRNA essentially equally active regardless of the nick position.

[0212] Similar results were observed when locked nucleic acid substitutions were made in the LacZ dicer substrate mdRNA of Example 2 (SEQ ID NOS:3 and 4). The lacZ dicer was nicked at positions 8 to 14, and a duplicate set of nicked LacZ dicer molecules were made with the exception that the A at position 3 (from the 5′-end) of the 5′ sense strand was substituted for a locked nucleic acid A (LNA-A). As is evident from FIG. 10, most of the nicked lacZ dicer molecules containing LNA-A were as potent in knockdown activity as the unsubstituted lacZ dicer.

### Example 7 MdRNA Knockdown of Influenza Virus Titer

[0213] The activity of a dicer substrate nicked dsRNA in reducing influenza virus titer as compared to a wild-type dsRNA (i.e., not having a nick) was examined. The influenza dicer substrate sequence (25/27) is as follows:

(SEQ ID NO:62)

| | |
|---|---|
| Sense | 5′-GGAUCUUAUUUCUUCGGAGACAAdTdG |

(SEQ ID NO:11)

| | |
|---|---|
| Antisense | 5′-CAUUGUCUCCGAAGAAAUAAGAUCCUU |

The mdRNA sequences have a nicked sense strand after position 12, 13, and 14, respectively, as counted from the 5′-end, and the G at position 2 is substituted with locked nucleic acid G.

[0214] For the viral infectivity assay, Vero cells were seeded at 6.5×10⁴ cells/well the day before transfection in 500 μl 10% FBS/DMEM media per well. Samples of 100, 10, 1, 0.1, and 0.01 nM stock of each dsRNA were complexed with 1.0 μl (1 mg/ml stock) of Lipofectamine™ 2000 (Invitrogen, Carlsbad, Calif.) and incubated for 20 minutes at room temperature in 150 μl OPTIMEM (total volume) (Gibco, Carlsbad, Calif.). Vero cells were washed with OPTIMEM, and 150 μl of the transfection complex in OPTIMEM was then added to each well containing 150 μl of OPTIMEM media. Triplicate wells were tested for each condition. An additional control well with no transfection condition was prepared. Three hours post transfection, the media was removed. Each well was washed once with 200 μl PBS containing 0.3% BSA and 10 mM HEPES/PS. Cells in each well were infected with WSN strain of influenza virus at an MOI 0.01 in 200 μl of infection media containing 0.3% BSA/10 mM HEPES/PS and 4 μg/ml trypsin. The plate was incubated for 1 hour at 37° C. Unadsorbed virus was washed off with the 200 μl of infection media and discarded, then 400 μl DMEM containing 0.3% BSA/10 mM HEPES/PS and 4 μg/ml trypsin was added to each well. The plate was incubated at 37° C., 5% CO₂ for 48 hours, then 50 μl supernatant from each well was tested in duplicate by TCID₅₀ assays (50% Tissue-Culture Infective Dose, WHO protocol) in MDCK cells and titers were estimated using the Spearman and Karber formula. The results show that these mdRNAs show about a 50% to 60% viral titer knockdown, even at a concentration as low as 10 pM (FIG. 11).

[0215] An in vivo influenza mouse model was also used to examine the activity of a dicer substrate nicked dsRNA in reducing influenza virus titer as compared to a wild-type dsRNA (i.e., not having a nick). Female BALB/c mice (age 8-10 weeks with 5-10 mice per group) were dosed intranasally with 120 nmol/kg/day dsRNA (formulated in C12-norArg(NH₃+Cl⁻)—C12/DSPE-PEG2000/DSPC/cholesterol at a ratio of 30:1:20:49) for three consecutive days before intranasal challenge with influenza strain PR8 (20 PFU/mouse). Two days after infection, whole lungs are harvested from each mouse and placed in a solution of PBS/0.3% BSA with antibiotics, homogenize, and measure the viral titer (TCID₅₀). Doses were well tolerated by the mice, indicated by less than 2% body weight reduction in any of the dose groups. The mdRNAs tested exhibit similar, if not slightly greater, virus reduction in vivo as compared to unmodified and unnicked G1498 dicer substrate (see FIG. 12). Hence, mdRNA are active in vivo.

### Example 8

### Effect of mdRNA On Cytokine Induction

[0216] The effect of the mdRNA structure on cytokine induction in vivo was examined. Female BALB/c mice (age 7-9 weeks) were dosed intranasally with about 50 μM dsRNA (formulated in C12-norArg(NH₃+Cl−)-C12/DSPE-PEG2000/DSPC/cholesterol at a ratio of 30:1:20:49) or with 605 nmol/kg/day naked dsRNA for three consecutive days. About four hours after the final dose is administered, the mice were sacrificed to collect bronchoalveolar fluid (BALF), and collected blood is processed to serum for evaluation of the cytokine response. Bronchial lavage was performed with 0.5 mL ice-cold 0.3% BSA in saline two times for a total of 1 mL. BALF was spun and supernatants collected and frozen until cytokine analysis. Blood was collected from the vena cava immediately following euthanasia, placed into serum separator tubes, and allowed to clot at room temperature for at least 20 minutes. The samples were processed to serum, aliquoted into Millipore ULTRAFREE 0.22 μm filter tubes, spun at 12,000 rpm, frozen on dry ice, and then stored at −70° C. until analysis. Cytokine analysis of BALF and plasma were performed using the Procarta mouse 10-Plex Cytokine Assay Kit (Panomics, Fremont, Calif.) on a Bio-Plex array reader. Toxicity parameters were also measured, including body weights, prior to the first dose on day 0 and again on day 3 (just prior to euthanasia). Spleens were harvested and weighed (normalized to final body weight). The results are provided in Table 5.

TABLE 5
In vivo Cytokine Induction by Naked mdRNA

| | | | G1498:Nkd | | G1498:DSNkd | G1498:DSNkd | G1498:DSNkd |
|---|---|---|---|---|---|---|---|
| Cytokine | | G1498 | 11-1 | G1498:DS | 12-1 | 13-1 | 14-1 |
| IL-6 | Conc | 90.68 | 10.07 | 77.35 | 17.17 | 18.21 | 38.59 |
| | (pg/mL) | | | | | | |
| | Fold decrease | — | 9 | — | 5 | 4 | 2 |
| IL-12 | Conc | 661.48 | 20.32 | 1403.61 | 25.07 | 37.70 | 57.02 |
| (p40) | (pg/mL) | | | | | | |
| | Fold decrease | — | 33 | — | 56 | 37 | 25 |
| TNFα | Conc | 264.49 | 25.59 | 112.95 | 20.52 | 29.00 | 64.93 |
| | (pg/mL) | | | | | | |
| | Fold decrease | — | 10 | — | 6 | 4 | 2 |

[0217] The mdRNA (RISC or dicer sized) induced cytokines to lesser extent than the intact (i.e., not nicked) parent molecules. The decrease in cytokine induction was greatest when looking at IL-12(p40), the cytokine with consistently the highest levels of induction of the 10 cytokine multiplex assay. For the mdRNA, the decrease in IL-12 (p40) ranges from 25- to 56-fold, while the reduction in either IL-6 or TNFα induction was more modest (the decrease in these two cytokines ranges from 2- to 10-fold). Thus, the mdRNA structure appears to provide an advantage in vivo in that cytokine induction is minimized compared to unmodified dsRNA.

[0218] Similar results were obtained with the formulated mdRNA, although the reduction in induction was not as prominent. In addition, the presence or absence of a locked nucleic acid has no effect on cytokine induction. These results are shown in Table 6.

TABLE 6
In vivo Cytokine Induction by Formulated mdRNA

| | | | G1498:Nkd | G1498:Nkd | G1498:DSNkd | G1498:DSNkd |
|---|---|---|---|---|---|---|
| Cytokine | | G1498:DS | 12-1 | 13-1 | 14-1 | 13 |
| IL-6 | Conc (pg/mL) | 29.04 | 52.95 | 10.28 | 7.79 | 44.29 |
| | Fold decrease | — | −1.8 | 3 | 4 | −1.5 |
| IL-12 (p40) | Conc (pg/mL) | 298.93 | 604.24 | 136.45 | 126.71 | 551.49 |
| | Fold decrease | — | 0 | 2 | 2 | 1 |
| TNFα | Conc (pg/mL) | 13.49 | 21.35 | 3.15 | 3.15 | 18.69 |
| | Fold decrease | — | −1.6 | 4 | 4 | 1.4 |

[0219] The teachings of all of references cited herein including patents, patent applications, journal articles, wedpages, tables, and priority documents are incorporated herein in their entirety by reference. Although the foregoing disclosure has been described in detail by way of example for purposes of clarity of understanding, it will be apparent to the artisan that certain changes and modifications may be practiced within the scope of the appended claims which are presented by way of illustration not limitation. In this context, various publications and other references have been cited within the foregoing disclosure for economy of description. It is noted, however, that the various publications discussed herein are incorporated solely for their disclosure prior to the filing date of the present application, and the inventors reserve the right to antedate such disclosure by virtue of prior invention.

The application's sequence listing, which the Patent Office published only in electronic form, follows.

SEQUENCE LISTING (2950 sequences)

SEQ ID NO: 1 - DNA, 21 bp, Artificial Sequence
  Description of Combined DNA/RNA Molecule: Synthetic oligonucleotide
  Description of Artificial Sequence: Synthetic oligonucleotide
cuacacaaaucagcgauuutt

SEQ ID NO: 2 - DNA, 21 bp, Artificial Sequence
  Description of Combined DNA/RNA Molecule: Synthetic oligonucleotide
  Description of Artificial Sequence: Synthetic oligonucleotide
aaaucgcugauuuguguagtt

SEQ ID NO: 3 - DNA, 25 bp, Artificial Sequence
  Description of Combined DNA/RNA Molecule: Synthetic oligonucleotide
  Description of Artificial Sequence: Synthetic oligonucleotide
cuacacaaaucagcgauuuccaugt

SEQ ID NO: 4 - RNA, 27 nt, Artificial Sequence
  Description of Artificial Sequence: Synthetic oligonucleotide
acauggaaaucgcugauuuguguaguc

SEQ ID NO: 5 - RNA, 13 nt, Artificial Sequence
  Description of Artificial Sequence: Synthetic oligonucleotide
cuacacaaaucag

SEQ ID NO: 6 - DNA, 11 bp, Artificial Sequence
  Description of Combined DNA/RNA Molecule: Synthetic oligonucleotide
  Description of Artificial Sequence: Synthetic oligonucleotide
gauuuccaugt

SEQ ID NO: 7 - DNA, 21 bp, Artificial Sequence
  Description of Combined DNA/RNA Molecule: Synthetic oligonucleotide
  Description of Artificial Sequence: Synthetic oligonucleotide
ggaucuuauuucuucggagtt

SEQ ID NO: 8 - DNA, 21 bp, Artificial Sequence
  Description of Combined DNA/RNA Molecule: Synthetic oligonucleotide
  Description of Artificial Sequence: Synthetic oligonucleotide
cuccgaagaaauaagaucctt

SEQ ID NO: 9 - RNA, 11 nt, Artificial Sequence
  Description of Artificial Sequence: Synthetic oligonucleotide
ggaucuuauuu

SEQ ID NO: 10 - DNA, 10 bp, Artificial Sequence
  Description of Combined DNA/RNA Molecule: Synthetic oligonucleotide
  Description of Artificial Sequence: Synthetic oligonucleotide
cuucggagtt

SEQ ID NO: 11 - RNA, 27 nt, Artificial Sequence
  Description of Artificial Sequence: Synthetic oligonucleotide
cauugucuccgaagaaauaagauccuu

SEQ ID NO: 12 - RNA, 8 nt, Artificial Sequence
  Description of Artificial Sequence: Synthetic oligonucleotide
  modified_base (2): LNA-G
ggaucuua

SEQ ID NO: 13 - DNA, 17 bp, Artificial Sequence
  Description of Combined DNA/RNA Molecule: Synthetic oligonucleotide
  Description of Artificial Sequence: Synthetic oligonucleotide
uuucuucggagacaatg

SEQ ID NO: 14 - DNA, 16 bp, Artificial Sequence
  Description of Combined DNA/RNA Molecule: Synthetic oligonucleotide
  Description of Artificial Sequence: Synthetic oligonucleotide
uucuucggagacaatg

SEQ ID NO: 15 - DNA, 15 bp, Artificial Sequence
  Description of Combined DNA/RNA Molecule: Synthetic oligonucleotide
  Description of Artificial Sequence: Synthetic oligonucleotide
ucuucggagacaatg

SEQ ID NO: 16 - DNA, 14 bp, Artificial Sequence
  Description of Combined DNA/RNA Molecule: Synthetic oligonucleotide
  Description of Artificial Sequence: Synthetic oligonucleotide
cuucggagacaatg

SEQ ID NO: 17 - DNA, 13 bp, Artificial Sequence
  Description of Combined DNA/RNA Molecule: Synthetic oligonucleotide
  Description of Artificial Sequence: Synthetic oligonucleotide
uucggagacaatg

SEQ ID NO: 18 - DNA, 12 bp, Artificial Sequence
  Description of Combined DNA/RNA Molecule: Synthetic oligonucleotide
  Description of Artificial Sequence: Synthetic oligonucleotide
ucggagacaatg

SEQ ID NO: 19 - DNA, 11 bp, Artificial Sequence
  Description of Combined DNA/RNA Molecule: Synthetic oligonucleotide
  Description of Artificial Sequence: Synthetic oligonucleotide
cggagacaatg

SEQ ID NO: 20 - RNA, 9 nt, Artificial Sequence
  Description of Artificial Sequence: Synthetic oligonucleotide
  modified_base (2): LNA-G
ggaucuuau

SEQ ID NO: 21 - RNA, 10 nt, Artificial Sequence
  Description of Artificial Sequence: Synthetic oligonucleotide
  modified_base (2): LNA-G
ggaucuuauu

SEQ ID NO: 22 - RNA, 11 nt, Artificial Sequence
  Description of Artificial Sequence: Synthetic oligonucleotide
  modified_base (2): LNA-G
ggaucuuauuu

SEQ ID NO: 23 - RNA, 12 nt, Artificial Sequence
  Description of Artificial Sequence: Synthetic oligonucleotide
  modified_base (2): LNA-G
ggaucuuauuuc

SEQ ID NO: 24 - RNA, 8 nt, Artificial Sequence
  Description of Artificial Sequence: Synthetic oligonucleotide
  modified_base (3): LNA-A
cuacacaa

SEQ ID NO: 25 - DNA, 13 bp, Artificial Sequence
  Description of Artificial Sequence: Synthetic oligonucleotide
  modified_base (8): LNA-A
aucagcgauuutt

SEQ ID NO: 26 - DNA, 12 bp, Artificial Sequence
  Description of Artificial Sequence: Synthetic oligonucleotide
  modified_base (7): LNA-A
ucagcgauuutt

SEQ ID NO: 27 - DNA, 11 bp, Artificial Sequence
  Description of Artificial Sequence: Synthetic oligonucleotide
  modified_base (6): LNA-A
cagcgauuutt

SEQ ID NO: 28 - DNA, 10 bp, Artificial Sequence
  Description of Artificial Sequence: Synthetic oligonucleotide
  modified_base (5): LNA-A
agcgauuutt

SEQ ID NO: 29 - DNA, 9 bp, Artificial Sequence
  Description of Artificial Sequence: Synthetic oligonucleotide
  modified_base (4): LNA-A
gcgauuutt

SEQ ID NO: 30 - DNA, 8 bp, Artificial Sequence
  Description of Artificial Sequence: Synthetic oligonucleotide
  modified_base (3): LNA-A
cgauuutt

SEQ ID NO: 31 - DNA, 7 bp, Artificial Sequence
  Description of Artificial Sequence: Synthetic oligonucleotide
  modified_base (2): LNA-A
gauuutt

SEQ ID NO: 32 - RNA, 9 nt, Artificial Sequence
  Description of Artificial Sequence: Synthetic oligonucleotide
  modified_base (3): LNA-A
cuacacaaa

SEQ ID NO: 33 - RNA, 10 nt, Artificial Sequence
  Description of Artificial Sequence: Synthetic oligonucleotide
  modified_base (3): LNA-A
cuacacaaau

SEQ ID NO: 34 - RNA, 11 nt, Artificial Sequence
  Description of Artificial Sequence: Synthetic oligonucleotide
  modified_base (3): LNA-A
cuacacaaauc

SEQ ID NO: 35 - RNA, 12 nt, Artificial Sequence
  Description of Artificial Sequence: Synthetic oligonucleotide
  modified_base (3): LNA-A
cuacacaaauca

SEQ ID NO: 36 - RNA, 13 nt, Artificial Sequence
  Description of Artificial Sequence: Synthetic oligonucleotide
  modified_base (3): LNA-A
cuacacaaaucag

SEQ ID NO: 37 - RNA, 14 nt, Artificial Sequence
  Description of Artificial Sequence: Synthetic oligonucleotide
  modified_base (3): LNA-A
cuacacaaaucagc

SEQ ID NO: 38 - RNA, 13 nt, Artificial Sequence
  Description of Artificial Sequence: Synthetic oligonucleotide
  modified_base (2): LNA-G
ggaucuuauuucu

SEQ ID NO: 39 - RNA, 14 nt, Artificial Sequence
  Description of Artificial Sequence: Synthetic oligonucleotide
  modified_base (2): LNA-G
ggaucuuauuucuu

SEQ ID NO: 40 - RNA, 8 nt, Artificial Sequence
  Description of Artificial Sequence: Synthetic oligonucleotide
  modified_base (2): LNA-G
  modified_base (8): LNA-A
ggaucuua

SEQ ID NO: 41 - RNA, 9 nt, Artificial Sequence
  Description of Artificial Sequence: Synthetic oligonucleotide
  modified_base (2): LNA-G
  modified_base (9): LNA-U
ggaucuuau

SEQ ID NO: 42 - RNA, 10 nt, Artificial Sequence
  Description of Artificial Sequence: Synthetic oligonucleotide
  modified_base (2): LNA-G
  modified_base (10): LNA-U
ggaucuuauu

SEQ ID NO: 43 - RNA, 11 nt, Artificial Sequence
  Description of Artificial Sequence: Synthetic oligonucleotide
  modified_base (2): LNA-G
  modified_base (11): LNA-U
ggaucuuauuu

SEQ ID NO: 44 - RNA, 12 nt, Artificial Sequence
  Description of Artificial Sequence: Synthetic oligonucleotide
  modified_base (2): LNA-G
  modified_base (12): LNA-C
ggaucuuauuuc

SEQ ID NO: 45 - RNA, 13 nt, Artificial Sequence
  Description of Artificial Sequence: Synthetic oligonucleotide
  modified_base (2): LNA-G
  modified_base (13): LNA-U
ggaucuuauuucu

SEQ ID NO: 46 - RNA, 14 nt, Artificial Sequence
  Description of Artificial Sequence: Synthetic oligonucleotide
  modified_base (2): LNA-G
  modified_base (14): LNA-U
ggaucuuauuucuu

SEQ ID NO: 47 - DNA, 13 bp, Artificial Sequence
  Description of Combined DNA/RNA Molecule: Synthetic oligonucleotide
  Description of Artificial Sequence: Synthetic oligonucleotide
  modified_base (8): LNA-G
uuucuucggagtt

SEQ ID NO: 48 - DNA, 12 bp, Artificial Sequence
  Description of Combined DNA/RNA Molecule: Synthetic oligonucleotide
  Description of Artificial Sequence: Synthetic oligonucleotide
  modified_base (7): LNA-G
uucuucggagtt

SEQ ID NO: 49 - DNA, 11 bp, Artificial Sequence
  Description of Combined DNA/RNA Molecule: Synthetic oligonucleotide
  Description of Artificial Sequence: Synthetic oligonucleotide
  modified_base (6): LNA-G
ucuucggagtt

SEQ ID NO: 50 - DNA, 10 bp, Artificial Sequence
  Description of Combined DNA/RNA Molecule: Synthetic oligonucleotide
  Description of Artificial Sequence: Synthetic oligonucleotide
  modified_base (5): LNA-G
cuucggagtt

SEQ ID NO: 51 - DNA, 9 bp, Artificial Sequence
  Description of Combined DNA/RNA Molecule: Synthetic oligonucleotide
  Description of Artificial Sequence: Synthetic oligonucleotide
  modified_base (4): LNA-G
uucggagtt

SEQ ID NO: 52 - DNA, 8 bp, Artificial Sequence
  Description of Combined DNA/RNA Molecule: Synthetic oligonucleotide
  Description of Artificial Sequence: Synthetic oligonucleotide
  modified_base (3): LNA-G
ucggagtt

SEQ ID NO: 53 - DNA, 7 bp, Artificial Sequence
  Description of Combined DNA/RNA Molecule: Synthetic oligonucleotide
  Description of Artificial Sequence: Synthetic oligonucleotide
  modified_base (2): LNA-G
cggagtt

SEQ ID NO: 54 - DNA, 13 bp, Artificial Sequence
  Description of Combined DNA/RNA Molecule: Synthetic oligonucleotide
  Description of Artificial Sequence: Synthetic oligonucleotide
  modified_base (1): LNA-U
  modified_base (8): LNA-G
uuucuucggagtt

SEQ ID NO: 55 - DNA, 12 bp, Artificial Sequence
  Description of Combined DNA/RNA Molecule: Synthetic oligonucleotide
  Description of Artificial Sequence: Synthetic oligonucleotide
  modified_base (1): LNA-U
  modified_base (7): LNA-G
uucuucggagtt

SEQ ID NO: 56 - DNA, 11 bp, Artificial Sequence
  Description of Combined DNA/RNA Molecule: Synthetic oligonucleotide
  Description of Artificial Sequence: Synthetic oligonucleotide
  modified_base (1): LNA-U
  modified_base (6): LNA-G
ucuucggagtt

SEQ ID NO: 57 - DNA, 10 bp, Artificial Sequence
  Description of Combined DNA/RNA Molecule: Synthetic oligonucleotide
  Description of Artificial Sequence: Synthetic oligonucleotide
  modified_base (1): LNA-C
  modified_base (5): LNA-G
cuucggagtt

SEQ ID NO: 58 - DNA, 9 bp, Artificial Sequence
  Description of Combined DNA/RNA Molecule: Synthetic oligonucleotide
  Description of Artificial Sequence: Synthetic oligonucleotide
  modified_base (1): LNA-U
  modified_base (4): LNA-G
uucggagtt

SEQ ID NO: 59 - DNA, 8 bp, Artificial Sequence
  Description of Combined DNA/RNA Molecule: Synthetic oligonucleotide
  Description of Artificial Sequence: Synthetic oligonucleotide
  modified_base (1): LNA-U
  modified_base (3): LNA-G
ucggagtt

SEQ ID NO: 60 - DNA, 7 bp, Artificial Sequence
  Description of Combined DNA/RNA Molecule: Synthetic oligonucleotide
  Description of Artificial Sequence: Synthetic oligonucleotide
  modified_base (1): LNA-C
  modified_base (2): LNA-G
cggagtt

SEQ ID NO: 61 - DNA, 21 bp, Artificial Sequence
  Description of Combined DNA/RNA Molecule: Synthetic oligonucleotide
  Description of Artificial Sequence: Synthetic oligonucleotide
  modified_base (2): LNA-G
  modified_base (16): LNA-G
ggaucuuauuucuucggagtt

SEQ ID NO: 62 - DNA, 25 bp, Artificial Sequence
  Description of Combined DNA/RNA Molecule: Synthetic oligonucleotide
  Description of Artificial Sequence: Synthetic oligonucleotide
ggaucuuauuucuucggagacaatg

SEQ ID NO: 63 - RNA, 25 nt, Artificial Sequence
  Description of Artificial Sequence: Synthetic oligonucleotide
uuaagcagaguucaaaagcccuuca

SEQ ID NO: 64 - RNA, 25 nt, Artificial Sequence
  Description of Artificial Sequence: Synthetic oligonucleotide
uaagcagaguucaaaagcccuucag

SEQ ID NO: 65 - RNA, 25 nt, Artificial Sequence
  Description of Artificial Sequence: Synthetic oligonucleotide
agcagaguucaaaagcccuucagcg

SEQ ID NO: 66 - RNA, 25 nt, Artificial Sequence
  Description of Artificial Sequence: Synthetic oligonucleotide
cucagggucugagugaagccgcucg

SEQ ID NO: 67 - RNA, 25 nt, Artificial Sequence
  Description of Artificial Sequence: Synthetic oligonucleotide
caagcaacuacaucacgccagucaa

SEQ ID NO: 68 - RNA, 25 nt, Artificial Sequence
  Description of Artificial Sequence: Synthetic oligonucleotide
aucaauggcagcuucuuggugcgug

SEQ ID NO: 69 - RNA, 25 nt, Artificial Sequence
  Description of Artificial Sequence: Synthetic oligonucleotide
uuccagcccacauuggauucaucag

SEQ ID NO: 70 - RNA, 25 nt, Artificial Sequence
  Description of Artificial Sequence: Synthetic oligonucleotide
cagcugagaauguggaauaccuaag

SEQ ID NO: 71 - RNA, 25 nt, Artificial Sequence
  Description of Artificial Sequence: Synthetic oligonucleotide
aacguaucuccuaauuugaggcuca

SEQ ID NO: 72 - RNA, 25 nt, Artificial Sequence
  Description of Artificial Sequence: Synthetic oligonucleotide
ccuaaaauaauuucucuacaauugg

SEQ ID NO: 73 - RNA, 25 nt, Artificial Sequence
  Description of Artificial Sequence: Synthetic oligonucleotide
uggaagauucagcuaguuaggagcc

SEQ ID NO: 74 - RNA, 25 nt, Artificial Sequence
  Description of Artificial Sequence: Synthetic oligonucleotide
uuaaacucuccuagucaauauccac

SEQ ID NO: 75 - RNA, 25 nt, Artificial Sequence
  Description of Artificial Sequence: Synthetic oligonucleotide
cagccuacaguuauguucagucaca

SEQ ID NO: 76 - RNA, 25 nt, Artificial Sequence
  Description of Artificial Sequence: Synthetic oligonucleotide
guuauguucagucacacacacauac

SEQ ID NO: 77 - RNA, 25 nt, Artificial Sequence
  Description of Artificial Sequence: Synthetic oligonucleotide
cacauacaaaauguuccuuuugcuu

SEQ ID NO: 78 - RNA, 25 nt, Artificial Sequence
  Description of Artificial Sequence: Synthetic oligonucleotide
uccuuuugcuuuuaaaguaauuuuu

SEQ ID NO: 79 - RNA, 25 nt, Artificial Sequence
  Description of Artificial Sequence: Synthetic oligonucleotide
ugaccugugaagcaacagucaaugg

SEQ ID NO: 80 - RNA, 25 nt, Artificial Sequence
  Description of Artificial Sequence: Synthetic oligonucleotide
cuaucucacacaucgacaaaccaau

SEQ ID NO: 81 - RNA, 25 nt, Artificial Sequence
  Description of Artificial Sequence: Synthetic oligonucleotide
uguccucaauuguacugcuaccacu

SEQ ID NO: 82 - RNA, 25 nt, Artificial Sequence
  Description of Artificial Sequence: Synthetic oligonucleotide
aaaccguagcuggcaagcggucuua

SEQ ID NO: 83 - RNA, 25 nt, Artificial Sequence
  Description of Artificial Sequence: Synthetic oligonucleotide
uagcuggcaagcggucuuaccggcu

SEQ ID NO: 84 - RNA, 25 nt, Artificial Sequence
  Description of Artificial Sequence: Synthetic oligonucleotide
uuguaugguuaaaagauggguuacc

SEQ ID NO: 85 - RNA, 25 nt, Artificial Sequence
  Description of Artificial Sequence: Synthetic oligonucleotide
ugguuaaaagauggguuaccugcga

SEQ ID NO: 86 - RNA, 25 nt, Artificial Sequence
  Description of Artificial Sequence: Synthetic oligonucleotide
cagggaauuauacaaucuugcugag

SEQ ID NO: 87 - RNA, 25 nt, Artificial Sequence
  Description of Artificial Sequence: Synthetic oligonucleotide
acaaucuugcugagcauaaaacagu

SEQ ID NO: 88 - RNA, 25 nt, Artificial Sequence
  Description of Artificial Sequence: Synthetic oligonucleotide
ccaauaaugaagaguccuuuauccu

SEQ ID NO: 89 - RNA, 25 nt, Artificial Sequence
  Description of Artificial Sequence: Synthetic oligonucleotide
acuuuggauguuccaacgcaaguug

SEQ ID NO: 90 - RNA, 25 nt, Artificial Sequence
  Description of Artificial Sequence: Synthetic oligonucleotide
aaugcuuccacuaaacugaaaccau

SEQ ID NO: 91 - RNA, 25 nt, Artificial Sequence
  Description of Artificial Sequence: Synthetic oligonucleotide
gagaaaguuugacuuuguuaaauau

SEQ ID NO: 92 - RNA, 25 nt, Artificial Sequence
  Description of Artificial Sequence: Synthetic oligonucleotide
aaagaacuacuguauauuaaaaguu

SEQ ID NO: 93 - RNA, 25 nt, Artificial Sequence
  Description of Artificial Sequence: Synthetic oligonucleotide
uuagaaauacggguuuugacuuaac

SEQ ID NO: 94 - RNA, 25 nt, Artificial Sequence
  Description of Artificial Sequence: Synthetic oligonucleotide
aacauggguacagcaaacucagcac

SEQ ID NO: 95 - RNA, 25 nt, Artificial Sequence
  Description of Artificial Sequence: Synthetic oligonucleotide
aaagacacagaagaugcugaccuca

SEQ ID NO: 96 - RNA, 25 nt, Artificial Sequence
  Description of Artificial Sequence: Synthetic oligonucleotide
uaguagggagguuuauucagaucgc

SEQ ID NO: 97 - RNA, 25 nt, Artificial Sequence
  Description of Artificial Sequence: Synthetic oligonucleotide
gccuucugcagcaggguucugggau

SEQ ID NO: 98 - RNA, 25 nt, Artificial Sequence
  Description of Artificial Sequence: Synthetic oligonucleotide
ggucugguacauauuggaaauuaug

SEQ ID NO: 99 - RNA, 25 nt, Artificial Sequence
  Description of Artificial Sequence: Synthetic oligonucleotide
cuaguccuuccgauggaagcacuag

SEQ ID NO: 100 - RNA, 25 nt, Artificial Sequence
  Description of Artificial Sequence: Synthetic oligonucleotide
ccagugaauauuguuuuuaugugga

SEQ ID NO: 101 - RNA, 25 nt, Artificial Sequence
  Description of Artificial Sequence: Synthetic oligonucleotide
augaauucaaguuggaauugguaga

SEQ ID NO: 102 - RNA, 25 nt, Artificial Sequence
  Description of Artificial Sequence: Synthetic oligonucleotide
caggacacagauuuagacuuggaga

SEQ ID NO: 103 - RNA, 25 nt, Artificial Sequence
  Description of Artificial Sequence: Synthetic oligonucleotide
cucaaagcacaguuacaguauucca

SEQ ID NO: 104 - RNA, 25 nt, Artificial Sequence
  Description of Artificial Sequence: Synthetic oligonucleotide
accacugccaccacugaugaauuaa

SEQ ID NO: 105 - RNA, 25 nt, Artificial Sequence
  Description of Artificial Sequence: Synthetic oligonucleotide
gaaacuacuagugccacaucaucac

SEQ ID NO: 106 - RNA, 25 nt, Artificial Sequence
  Description of Artificial Sequence: Synthetic oligonucleotide
aagucggacagccucaccaaacaga

SEQ ID NO: 107 - RNA, 25 nt, Artificial Sequence
  Description of Artificial Sequence: Synthetic oligonucleotide
gaaagcgaaaaauggaacaugaugg

SEQ ID NO: 108 - RNA, 25 nt, Artificial Sequence
  Description of Artificial Sequence: Synthetic oligonucleotide
cccucugauuuagcauguagacugc

SEQ ID NO: 109 - RNA, 25 nt, Artificial Sequence
  Description of Artificial Sequence: Synthetic oligonucleotide
ugagcuauuuaaggaucuauuuaug

SEQ ID NO: 110 - RNA, 25 nt, Artificial Sequence
  Description of Artificial Sequence: Synthetic oligonucleotide
aaaaggugaaaaagcacuauuauca

SEQ ID NO: 111 - RNA, 25 nt, Artificial Sequence
  Description of Artificial Sequence: Synthetic oligonucleotide
gaaaaagcacuauuaucaguucugc

SEQ ID NO: 112 - RNA, 25 nt, Artificial Sequence
  Description of Artificial Sequence: Synthetic oligonucleotide
ggcugaaaagaaagauuaaaccuac

SEQ ID NO: 113 - RNA, 25 nt, Artificial Sequence
  Description of Artificial Sequence: Synthetic oligonucleotide
uaaacccuuauaauaaaauccuucu

SEQ ID NO: 114 - RNA, 25 nt, Artificial Sequence
  Description of Artificial Sequence: Synthetic oligonucleotide
cauacuauuagccaaugcuguagac

SEQ ID NO: 115 - RNA, 25 nt, Artificial Sequence
  Description of Artificial Sequence: Synthetic oligonucleotide
gacagaagcauuuugauaggaauag

SEQ ID NO: 116 - RNA, 25 nt, Artificial Sequence
  Description of Artificial Sequence: Synthetic oligonucleotide
agagcaaauaagauaauggcccuga

SEQ ID NO: 117 - RNA, 25 nt, Artificial Sequence
  Description of Artificial Sequence: Synthetic oligonucleotide
ccaacauuuuucucuuccucaagca

SEQ ID NO: 118 - RNA, 25 nt, Artificial Sequence
  Description of Artificial Sequence: Synthetic oligonucleotide
uuaaguaugagaaaaguucagccca

SEQ ID NO: 119 - RNA, 25 nt, Artificial Sequence
  Description of Artificial Sequence: Synthetic oligonucleotide
caggaauaaagauggcugcugaacc

SEQ ID NO: 120 - RNA, 25 nt, Artificial Sequence
  Description of Artificial Sequence: Synthetic oligonucleotide
aauuugaaugaccaaguucucuuca

SEQ ID NO: 121 - RNA, 25 nt, Artificial Sequence
  Description of Artificial Sequence: Synthetic oligonucleotide
auguauaaagauagccagccuagag

SEQ ID NO: 122 - RNA, 25 nt, Artificial Sequence
  Description of Artificial Sequence: Synthetic oligonucleotide
ggcuguaacuaucucugugaagugu

SEQ ID NO: 123 - RNA, 25 nt, Artificial Sequence
  Description of Artificial Sequence: Synthetic oligonucleotide
ucugugaagugugagaaaauuucaa

SEQ ID NO: 124 - RNA, 25 nt, Artificial Sequence
  Description of Artificial Sequence: Synthetic oligonucleotide
ccuuuaaggaaaugaauccuccuga

SEQ ID NO: 125 - RNA, 25 nt, Artificial Sequence
  Description of Artificial Sequence: Synthetic oligonucleotide
aaggauacaaaaagugacaucauau

SEQ ID NO: 126 - RNA, 25 nt, Artificial Sequence
  Description of Artificial Sequence: Synthetic oligonucleotide
agaugcaauuugaaucuucaucaua

SEQ ID NO: 127 - RNA, 25 nt, Artificial Sequence
  Description of Artificial Sequence: Synthetic oligonucleotide
guucaaaacgaagacuagcuauuaa

SEQ ID NO: 128 - RNA, 25 nt, Artificial Sequence
  Description of Artificial Sequence: Synthetic oligonucleotide
gugaaaccucaucucuacuaaaaau

SEQ ID NO: 129 - RNA, 25 nt, Artificial Sequence
  Description of Artificial Sequence: Synthetic oligonucleotide
acgaaagagaagcucuaucucgccu

SEQ ID NO: 130 - RNA, 25 nt, Artificial Sequence
  Description of Artificial Sequence: Synthetic oligonucleotide
cuccacaagcgccuucgguccaguu

SEQ ID NO: 131 - RNA, 25 nt, Artificial Sequence
  Description of Artificial Sequence: Synthetic oligonucleotide
gagaagauuccaaagauguagccgc

SEQ ID NO: 132 - RNA, 25 nt, Artificial Sequence
  Description of Artificial Sequence: Synthetic oligonucleotide
aaucuggauucaaugaggagacuug

SEQ ID NO: 133 - RNA, 25 nt, Artificial Sequence
  Description of Artificial Sequence: Synthetic oligonucleotide
agaacagauuugagaguagugagga

SEQ ID NO: 134 - RNA, 25 nt, Artificial Sequence
  Description of Artificial Sequence: Synthetic oligonucleotide
ccagagcugugcagaugaguacaaa

SEQ ID NO: 135 - RNA, 25 nt, Artificial Sequence
  Description of Artificial Sequence: Synthetic oligonucleotide
ccucagauuguuguuguuaaugggc

SEQ ID NO: 136 - RNA, 25 nt, Artificial Sequence
  Description of Artificial Sequence: Synthetic oligonucleotide
cuauuuuaauuauuuuuaauuuauu

SEQ ID NO: 137 - RNA, 25 nt, Artificial Sequence
  Description of Artificial Sequence: Synthetic oligonucleotide
uuuaauuuauuaauauuuaaauaug

SEQ ID NO: 138 - RNA, 25 nt, Artificial Sequence
  Description of Artificial Sequence: Synthetic oligonucleotide
augcaguuugaauauccuuuguuuc

SEQ ID NO: 139 - RNA, 25 nt, Artificial Sequence
  Description of Artificial Sequence: Synthetic oligonucleotide
caugcugcuggcgucuaaguguuug

SEQ ID NO: 140 - RNA, 25 nt, Artificial Sequence
  Description of Artificial Sequence: Synthetic oligonucleotide
agaugugcauuucaccugugacaaa

SEQ ID NO: 141 - RNA, 25 nt, Artificial Sequence
  Description of Artificial Sequence: Synthetic oligonucleotide
ucaaaaccugugccaggcugaauua

SEQ ID NO: 142 - RNA, 25 nt, Artificial Sequence
  Description of Artificial Sequence: Synthetic oligonucleotide
gaauguggguagucauucuuacaau

SEQ ID NO: 143 - RNA, 25 nt, Artificial Sequence
  Description of Artificial Sequence: Synthetic oligonucleotide
auguggguagucauucuuacaauug

SEQ ID NO: 144 - RNA, 25 nt, Artificial Sequence
  Description of Artificial Sequence: Synthetic oligonucleotide
ugaaaaugagcaucagagaguguac

SEQ ID NO: 145 - RNA, 25 nt, Artificial Sequence
  Description of Artificial Sequence: Synthetic oligonucleotide
uugcuuuucauguagaacucagcag

SEQ ID NO: 146 - RNA, 25 nt, Artificial Sequence
  Description of Artificial Sequence: Synthetic oligonucleotide
uguauuucuauauuuauuuucagua

SEQ ID NO: 147 - RNA, 25 nt, Artificial Sequence
  Description of Artificial Sequence: Synthetic oligonucleotide
uuugauuaauguuucuuaaauggaa

SEQ ID NO: 148 - RNA, 25 nt, Artificial Sequence
  Description of Artificial Sequence: Synthetic oligonucleotide
caacguguauagugccuaaaauugu

SEQ ID NO: 149 - RNA, 25 nt, Artificial Sequence
  Description of Artificial Sequence: Synthetic oligonucleotide
cauauccuuggcuacuaacaucugg

SEQ ID NO: 150 - RNA, 25 nt, Artificial Sequence
  Description of Artificial Sequence: Synthetic oligonucleotide
uacuaacaucuggagacugugagcu

SEQ ID NO: 151 - RNA, 25 nt, Artificial Sequence
  Description of Artificial Sequence: Synthetic oligonucleotide
cauaaguugugugcuuuuuauuaau

SEQ ID NO: 152 - RNA, 25 nt, Artificial Sequence
  Description of Artificial Sequence: Synthetic oligonucleotide
gcaucauuuuggcucuucuuacauu

SEQ ID NO: 153 - RNA, 25 nt, Artificial Sequence
  Description of Artificial Sequence: Synthetic oligonucleotide
gcucuucuuacauuuguaaaaaugu

SEQ ID NO: 154 - RNA, 25 nt, Artificial Sequence
  Description of Artificial Sequence: Synthetic oligonucleotide
agauuaggucaucuuaauucauauu

SEQ ID NO: 155 - RNA, 25 nt, Artificial Sequence
  Description of Artificial Sequence: Synthetic oligonucleotide
auggaauugaaagaacuaaucauga

SEQ ID NO: 156 - RNA, 25 nt, Artificial Sequence
  Description of Artificial Sequence: Synthetic oligonucleotide
cacacucauuccuucugcucuuggg

SEQ ID NO: 157 - RNA, 25 nt, Artificial Sequence
  Description of Artificial Sequence: Synthetic oligonucleotide
uguagagguaaccaguagcuuugag

SEQ ID NO: 158 - RNA, 25 nt, Artificial Sequence
  Description of Artificial Sequence: Synthetic oligonucleotide
caaccacaugccacguaauauuuca

SEQ ID NO: 159 - RNA, 25 nt, Artificial Sequence
  Description of Artificial Sequence: Synthetic oligonucleotide
ucggaaacaaguuauucucuucacu

SEQ ID NO: 160 - RNA, 25 nt, Artificial Sequence
  Description of Artificial Sequence: Synthetic oligonucleotide
acucccaauaacuaaugcuaagaaa

SEQ ID NO: 161 - RNA, 25 nt, Artificial Sequence
  Description of Artificial Sequence: Synthetic oligonucleotide
aaugcuaagaaaugcugaaaaucaa

SEQ ID NO: 162 - RNA, 25 nt, Artificial Sequence
  Description of Artificial Sequence: Synthetic oligonucleotide
gucuuucucuaaauaugauuacuuu

SEQ ID NO: 163 - RNA, 25 nt, Artificial Sequence
  Description of Artificial Sequence: Synthetic oligonucleotide
ugaauuucaggcauuuuguucuaca

SEQ ID NO: 164 - RNA, 25 nt, Artificial Sequence
  Description of Artificial Sequence: Synthetic oligonucleotide
cgauucccucucacccgggacucuc

SEQ ID NO: 165 - RNA, 25 nt, Artificial Sequence
  Description of Artificial Sequence: Synthetic oligonucleotide
aggaaagugaaccuuuaaaguaaag

SEQ ID NO: 166 - RNA, 25 nt, Artificial Sequence
  Description of Artificial Sequence: Synthetic oligonucleotide
gaggcugcaugcucuggaagccugg

SEQ ID NO: 167 - RNA, 25 nt, Artificial Sequence
  Description of Artificial Sequence: Synthetic oligonucleotide
ucucugaacagaaaacaaaagagag

SEQ ID NO: 168 - RNA, 25 nt, Artificial Sequence
  Description of Artificial Sequence: Synthetic oligonucleotide
aacuuggcuguaaucaguuaugccg

SEQ ID NO: 169 - RNA, 25 nt, Artificial Sequence
  Description of Artificial Sequence: Synthetic oligonucleotide
agaagccaaaauuaaaagaagucca

SEQ ID NO: 170 - RNA, 25 nt, Artificial Sequence
  Description of Artificial Sequence: Synthetic oligonucleotide
auuaaaagaaguccaggugagguua

SEQ ID NO: 171 - RNA, 25 nt, Artificial Sequence
  Description of Artificial Sequence: Synthetic oligonucleotide
gaauccggauuaucgggaagaggac

SEQ ID NO: 172 - RNA, 25 nt, Artificial Sequence
  Description of Artificial Sequence: Synthetic oligonucleotide
aaugugacaucaaagcaaguauugu

SEQ ID NO: 173 - RNA, 25 nt, Artificial Sequence
  Description of Artificial Sequence: Synthetic oligonucleotide
caucaaagcaaguauuguagcacuc

SEQ ID NO: 174 - RNA, 25 nt, Artificial Sequence
  Description of Artificial Sequence: Synthetic oligonucleotide
agagagagaaaacaaaaccacaaau

SEQ ID NO: 175 - RNA, 25 nt, Artificial Sequence
  Description of Artificial Sequence: Synthetic oligonucleotide
ucgcuguaguauuuaagcccauaca

SEQ ID NO: 176 - RNA, 25 nt, Artificial Sequence
  Description of Artificial Sequence: Synthetic oligonucleotide
cgcuguaguauuuaagcccauacag

SEQ ID NO: 177 - RNA, 25 nt, Artificial Sequence
  Description of Artificial Sequence: Synthetic oligonucleotide
auuuaagcccauacagaaaccuucc

SEQ ID NO: 178 - RNA, 25 nt, Artificial Sequence
  Description of Artificial Sequence: Synthetic oligonucleotide
auuaaaauaaacaugguauaccuac

SEQ ID NO: 179 - RNA, 25 nt, Artificial Sequence
  Description of Artificial Sequence: Synthetic oligonucleotide
cuguucugaucggccaguuuucgga

SEQ ID NO: 180 - RNA, 25 nt, Artificial Sequence
  Description of Artificial Sequence: Synthetic oligonucleotide
aaauaauuugaacuuuggaacaggg

SEQ ID NO: 181 - RNA, 25 nt, Artificial Sequence
  Description of Artificial Sequence: Synthetic oligonucleotide
ugcgaccuuaauuuaacuuuccagu

SEQ ID NO: 182 - RNA, 25 nt, Artificial Sequence
  Description of Artificial Sequence: Synthetic oligonucleotide
cugagaaagcuaaaguuugguuuug

SEQ ID NO: 183 - RNA, 25 nt, Artificial Sequence
  Description of Artificial Sequence: Synthetic oligonucleotide
aguaaagaugcuacuucccacugua

SEQ ID NO: 184 - RNA, 25 nt, Artificial Sequence
  Description of Artificial Sequence: Synthetic oligonucleotide
cugcuuaauugcugauaccauauga

SEQ ID NO: 185 - RNA, 25 nt, Artificial Sequence
  Description of Artificial Sequence: Synthetic oligonucleotide
uaccauaugaaugaaacaugggcug

SEQ ID NO: 186 - RNA, 25 nt, Artificial Sequence
  Description of Artificial Sequence: Synthetic oligonucleotide
aacuuucuuauccaacuuuuucaua

SEQ ID NO: 187 - RNA, 25 nt, Artificial Sequence
  Description of Artificial Sequence: Synthetic oligonucleotide
ccuugcaugacaucaugaggccgga

SEQ ID NO: 188 - RNA, 25 nt, Artificial Sequence
  Description of Artificial Sequence: Synthetic oligonucleotide
ugaauuuguauaugacugcauuugu

SEQ ID NO: 189 - RNA, 25 nt, Artificial Sequence
  Description of Artificial Sequence: Synthetic oligonucleotide
gaauccuaguagaauguuuacuacc

SEQ ID NO: 190 - RNA, 25 nt, Artificial Sequence
  Description of Artificial Sequence: Synthetic oligonucleotide
gaaagggaagaauuuuuugaugaaa

SEQ ID NO: 191 - RNA, 25 nt, Artificial Sequence
  Description of Artificial Sequence: Synthetic oligonucleotide
uaucggcaugccagugugugaauuu

SEQ ID NO: 192 - RNA, 25 nt, Artificial Sequence
  Description of Artificial Sequence: Synthetic oligonucleotide
caccucauaguagagcaauguaugu

SEQ ID NO: 193 - RNA, 25 nt, Artificial Sequence
  Description of Artificial Sequence: Synthetic oligonucleotide
ccagaauugccaaagcacauauaua

SEQ ID NO: 194 - RNA, 25 nt, Artificial Sequence
  Description of Artificial Sequence: Synthetic oligonucleotide
uggugaucuggguaauaguuucucc

SEQ ID NO: 195 - RNA, 25 nt, Artificial Sequence
  Description of Artificial Sequence: Synthetic oligonucleotide
gaucuggguaauaguuucuccaaau

SEQ ID NO: 196 - RNA, 25 nt, Artificial Sequence
  Description of Artificial Sequence: Synthetic oligonucleotide
ggaugugaugaauacuuccuagaaa

SEQ ID NO: 197 - RNA, 25 nt, Artificial Sequence
  Description of Artificial Sequence: Synthetic oligonucleotide
cauuuccacagcuacaccauauaug

SEQ ID NO: 198 - RNA, 25 nt, Artificial Sequence
  Description of Artificial Sequence: Synthetic oligonucleotide
acagcuacaccauauaugaauggag

SEQ ID NO: 199 - RNA, 25 nt, Artificial Sequence
  Description of Artificial Sequence: Synthetic oligonucleotide
ugcaguucuuacacgagaagaagau

SEQ ID NO: 200 - RNA, 25 nt, Artificial Sequence
  Description of Artificial Sequence: Synthetic oligonucleotide
acgagaagaagaucauuuacaggga

SEQ ID NO: 201 - RNA, 25 nt, Artificial Sequence
  Description of Artificial Sequence: Synthetic oligonucleotide
cgagaagaagaucauuuacagggac

SEQ ID NO: 202 - RNA, 25 nt, Artificial Sequence
  Description of Artificial Sequence: Synthetic oligonucleotide
aagaagaucauuuacagggaccuga

SEQ ID NO: 203 - RNA, 25 nt, Artificial Sequence
  Description of Artificial Sequence: Synthetic oligonucleotide
agaggaagagguguuugacugcauc

SEQ ID NO: 204 - RNA, 25 nt, Artificial Sequence
  Description of Artificial Sequence: Synthetic oligonucleotide
gaggaagagguguuugacugcaucg

SEQ ID NO: 205 - RNA, 25 nt, Artificial Sequence
  Description of Artificial Sequence: Synthetic oligonucleotide
cuacuuugagggcgaguucacaggg

SEQ ID NO: 206 - RNA, 25 nt, Artificial Sequence
  Description of Artificial Sequence: Synthetic oligonucleotide
agggcaucuccuggcaccucugucc

SEQ ID NO: 207 - RNA, 25 nt, Artificial Sequence
  Description of Artificial Sequence: Synthetic oligonucleotide
ggagugauaugguuugucuuuuuaa

SEQ ID NO: 208 - RNA, 25 nt, Artificial Sequence
  Description of Artificial Sequence: Synthetic oligonucleotide
gagugauaugguuugucuuuuuaag

SEQ ID NO: 209 - RNA, 25 nt, Artificial Sequence
  Description of Artificial Sequence: Synthetic oligonucleotide
ugcaguaaagauccuaaagguuguc

SEQ ID NO: 210 - RNA, 25 nt, Artificial Sequence
  Description of Artificial Sequence: Synthetic oligonucleotide
aguaaagauccuaaagguugucgac

SEQ ID NO: 211 - RNA, 25 nt, Artificial Sequence
  Description of Artificial Sequence: Synthetic oligonucleotide
ugacaaaggacaaccuggcaauugu

SEQ ID NO: 212 - RNA, 25 nt, Artificial Sequence
  Description of Artificial Sequence: Synthetic oligonucleotide
gcaauugugacccaguggugcgagg

SEQ ID NO: 213 - RNA, 25 nt, Artificial Sequence
  Description of Artificial Sequence: Synthetic oligonucleotide
aacaucauccauagagacaugaaau

SEQ ID NO: 214 - RNA, 25 nt, Artificial Sequence
  Description of Artificial Sequence: Synthetic oligonucleotide
ugaaauccaacaauauauuucucca

SEQ ID NO: 215 - RNA, 25 nt, Artificial Sequence
  Description of Artificial Sequence: Synthetic oligonucleotide
aacaauauauuucuccaugaaggcu

SEQ ID NO: 216 - RNA, 25 nt, Artificial Sequence
  Description of Artificial Sequence: Synthetic oligonucleotide
aacaguaaagucacgcuggaguggu

SEQ ID NO: 217 - RNA, 25 nt, Artificial Sequence
  Description of Artificial Sequence: Synthetic oligonucleotide
ugugaagaaaguaaaggaagagagg

SEQ ID NO: 218 - RNA, 25 nt, Artificial Sequence
  Description of Artificial Sequence: Synthetic oligonucleotide
cuuccgagccauccuugcaucgggc

SEQ ID NO: 219 - RNA, 25 nt, Artificial Sequence
  Description of Artificial Sequence: Synthetic oligonucleotide
aauggagguugaauauccuacugug

SEQ ID NO: 220 - RNA, 25 nt, Artificial Sequence
  Description of Artificial Sequence: Synthetic oligonucleotide
ggagguugaauauccuacuguguaa

SEQ ID NO: 221 - RNA, 25 nt, Artificial Sequence
  Description of Artificial Sequence: Synthetic oligonucleotide
auuuugaguuuucccuuguagugua

SEQ ID NO: 222 - RNA, 25 nt, Artificial Sequence
  Description of Artificial Sequence: Synthetic oligonucleotide
uauccuguuuguucuuuguugauug

SEQ ID NO: 223 - RNA, 25 nt, Artificial Sequence
  Description of Artificial Sequence: Synthetic oligonucleotide
ccuguuuguucuuuguugauugaaa

SEQ ID NO: 224 - RNA, 25 nt, Artificial Sequence
  Description of Artificial Sequence: Synthetic oligonucleotide
cucuacagccuucuuuuucuuccau

SEQ ID NO: 225 - RNA, 25 nt, Artificial Sequence
  Description of Artificial Sequence: Synthetic oligonucleotide
ucuuccauagcuaaucuuccuucua

SEQ ID NO: 226 - RNA, 25 nt, Artificial Sequence
  Description of Artificial Sequence: Synthetic oligonucleotide
auaaucuuccuguugaaugcuucau

SEQ ID NO: 227 - RNA, 25 nt, Artificial Sequence
  Description of Artificial Sequence: Synthetic oligonucleotide
uaaucuuccuguugaaugcuucaug

SEQ ID NO: 228 - RNA, 25 nt, Artificial Sequence
  Description of Artificial Sequence: Synthetic oligonucleotide
cuucaugacuugaauucuacuuuga

SEQ ID NO: 229 - RNA, 25 nt, Artificial Sequence
  Description of Artificial Sequence: Synthetic oligonucleotide
aagagggagagaagcaacuacagac

SEQ ID NO: 230 - RNA, 25 nt, Artificial Sequence
  Description of Artificial Sequence: Synthetic oligonucleotide
cgucuccuaccagaccaaggucaac

SEQ ID NO: 231 - RNA, 25 nt, Artificial Sequence
  Description of Artificial Sequence: Synthetic oligonucleotide
gaucaaucggcccgacuaucucgac

SEQ ID NO: 232 - RNA, 25 nt, Artificial Sequence
  Description of Artificial Sequence: Synthetic oligonucleotide
ggacgaacauccaaccuucccaaac

SEQ ID NO: 233 - RNA, 25 nt, Artificial Sequence
  Description of Artificial Sequence: Synthetic oligonucleotide
agggucggaacccaagcuuagaacu

SEQ ID NO: 234 - RNA, 25 nt, Artificial Sequence
  Description of Artificial Sequence: Synthetic oligonucleotide
ucggaacccaagcuuagaacuuuaa

SEQ ID NO: 235 - RNA, 25 nt, Artificial Sequence
  Description of Artificial Sequence: Synthetic oligonucleotide
acccaagcuuagaacuuuaagcaac

SEQ ID NO: 236 - RNA, 25 nt, Artificial Sequence
  Description of Artificial Sequence: Synthetic oligonucleotide
gaacuuuaagcaacaagaccaccac

SEQ ID NO: 237 - RNA, 25 nt, Artificial Sequence
  Description of Artificial Sequence: Synthetic oligonucleotide
acuauucaguggcgagaaauaaagu

SEQ ID NO: 238 - RNA, 25 nt, Artificial Sequence
  Description of Artificial Sequence: Synthetic oligonucleotide
cuauucaguggcgagaaauaaaguu

SEQ ID NO: 239 - RNA, 25 nt, Artificial Sequence
  Description of Artificial Sequence: Synthetic oligonucleotide
aaacacagauaacaggaaaugaucc

SEQ ID NO: 240 - RNA, 25 nt, Artificial Sequence
  Description of Artificial Sequence: Synthetic oligonucleotide
cuuaagaaaagagaagaaaugaaac

SEQ ID NO: 241 - RNA, 25 nt, Artificial Sequence
  Description of Artificial Sequence: Synthetic oligonucleotide
cugaaggaguguguuuccauccucc

SEQ ID NO: 242 - RNA, 25 nt, Artificial Sequence
  Description of Artificial Sequence: Synthetic oligonucleotide
ucaccgcgggacugaaaaucuuuga

SEQ ID NO: 243 - RNA, 25 nt, Artificial Sequence
  Description of Artificial Sequence: Synthetic oligonucleotide
agcagaaauaagcgugccguucagg

SEQ ID NO: 244 - RNA, 25 nt, Artificial Sequence
  Description of Artificial Sequence: Synthetic oligonucleotide
aagcgugccguucaggguccagaag

SEQ ID NO: 245 - RNA, 25 nt, Artificial Sequence
  Description of Artificial Sequence: Synthetic oligonucleotide
agaaacagucacucaagacugcuug

SEQ ID NO: 246 - RNA, 25 nt, Artificial Sequence
  Description of Artificial Sequence: Synthetic oligonucleotide
agaggaagaagguccaugucuuugg

SEQ ID NO: 247 - RNA, 25 nt, Artificial Sequence
  Description of Artificial Sequence: Synthetic oligonucleotide
uguauucaaaauaugccugaaacac

SEQ ID NO: 248 - RNA, 25 nt, Artificial Sequence
  Description of Artificial Sequence: Synthetic oligonucleotide
auuuuccucccuuucucuguaccuc

SEQ ID NO: 249 - RNA, 25 nt, Artificial Sequence
  Description of Artificial Sequence: Synthetic oligonucleotide
caaagaaagauagagcaagacaaga

SEQ ID NO: 250 - RNA, 25 nt, Artificial Sequence
  Description of Artificial Sequence: Synthetic oligonucleotide
aagaaagauagagcaagacaagaaa

SEQ ID NO: 251 - RNA, 25 nt, Artificial Sequence
  Description of Artificial Sequence: Synthetic oligonucleotide
gaaagcauuuguuuguacaagaucc

SEQ ID NO: 252 - RNA, 25 nt, Artificial Sequence
  Description of Artificial Sequence: Synthetic oligonucleotide
ugaguuaaacgaacguacuugcaga

SEQ ID NO: 253 - RNA, 25 nt, Artificial Sequence
  Description of Artificial Sequence: Synthetic oligonucleotide
acugauacagaacgaucgauacaga

SEQ ID NO: 254 - RNA, 25 nt, Artificial Sequence
  Description of Artificial Sequence: Synthetic oligonucleotide
auauuauauauauauaaaaauaaau

SEQ ID NO: 255 - RNA, 25 nt, Artificial Sequence
  Description of Artificial Sequence: Synthetic oligonucleotide
auuauauauauauaaaaauaaauau

SEQ ID NO: 256 - RNA, 25 nt, Artificial Sequence
  Description of Artificial Sequence: Synthetic oligonucleotide
ucacuggauguauuugacugcugug

SEQ ID NO: 257 - RNA, 25 nt, Artificial Sequence
  Description of Artificial Sequence: Synthetic oligonucleotide
cagggaagaggaggagaugagagac

SEQ ID NO: 258 - RNA, 25 nt, Artificial Sequence
  Description of Artificial Sequence: Synthetic oligonucleotide
augaucuuuuuuuugucccacuugg

SEQ ID NO: 259 - RNA, 27 nt, Artificial Sequence
  Description of Artificial Sequence: Synthetic oligonucleotide
ggccgugaacuccucaucaaaauaccu

SEQ ID NO: 260 - RNA, 27 nt, Artificial Sequence
  Description of Artificial Sequence: Synthetic oligonucleotide
uggugugauggugaucaucugggccgu

SEQ ID NO: 261 - RNA, 27 nt, Artificial Sequence
  Description of Artificial Sequence: Synthetic oligonucleotide
aaacccgcaggauaguuuucuucccua

SEQ ID NO: 262 - RNA, 27 nt, Artificial Sequence
  Description of Artificial Sequence: Synthetic oligonucleotide
caaacuggaugaaauaaauuaaaaccc

SEQ ID NO: 263 - RNA, 27 nt, Artificial Sequence
  Description of Artificial Sequence: Synthetic oligonucleotide
agaaguccuuaacauuucccuacguga

SEQ ID NO: 264 - RNA, 27 nt, Artificial Sequence
  Description of Artificial Sequence: Synthetic oligonucleotide
cucugucccacuggguaaacccuggcc

SEQ ID NO: 265 - RNA, 27 nt, Artificial Sequence
  Description of Artificial Sequence: Synthetic oligonucleotide
cacaauaacaaauuuaaaccuugcucc

SEQ ID NO: 266 - RNA, 27 nt, Artificial Sequence
  Description of Artificial Sequence: Synthetic oligonucleotide
aaaugcauuugaacaacauaauacaca

SEQ ID NO: 267 - RNA, 27 nt, Artificial Sequence
  Description of Artificial Sequence: Synthetic oligonucleotide
ggcuuuccugucacaaagauuaaaaac

SEQ ID NO: 268 - RNA, 27 nt, Artificial Sequence
  Description of Artificial Sequence: Synthetic oligonucleotide
agggcuuuccugucacaaagauuaaaa

SEQ ID NO: 269 - RNA, 27 nt, Artificial Sequence
  Description of Artificial Sequence: Synthetic oligonucleotide
ggccaugcugggagacauaagcagcag

SEQ ID NO: 270 - RNA, 27 nt, Artificial Sequence
  Description of Artificial Sequence: Synthetic oligonucleotide
ucagggagaagcuucugaaacacuucu

SEQ ID NO: 271 - RNA, 27 nt, Artificial Sequence
  Description of Artificial Sequence: Synthetic oligonucleotide
aagggcuucuuccuuauugauggucag

SEQ ID NO: 272 - RNA, 27 nt, Artificial Sequence
  Description of Artificial Sequence: Synthetic oligonucleotide
ugaagggcuucuuccuuauugaugguc

SEQ ID NO: 273 - RNA, 27 nt, Artificial Sequence
  Description of Artificial Sequence: Synthetic oligonucleotide
cgcugaagggcuucuuccuuauugaug

SEQ ID NO: 274 - RNA, 27 nt, Artificial Sequence
  Description of Artificial Sequence: Synthetic oligonucleotide
gccgcugaagggcuucuuccuuauuga

SEQ ID NO: 275 - RNA, 27 nt, Artificial Sequence
  Description of Artificial Sequence: Synthetic oligonucleotide
acuggccgcugaagggcuucuuccuua

SEQ ID NO: 276 - RNA, 27 nt, Artificial Sequence
  Description of Artificial Sequence: Synthetic oligonucleotide
cggagcuuuucaccuuuaguuaugcuu

SEQ ID NO: 277 - RNA, 27 nt, Artificial Sequence
  Description of Artificial Sequence: Synthetic oligonucleotide
ccggagcuuuucaccuuuaguuaugcu

SEQ ID NO: 278 - RNA, 27 nt, Artificial Sequence
  Description of Artificial Sequence: Synthetic oligonucleotide
cagacuguugacuggcgugauguaguu

SEQ ID NO: 279 - RNA, 27 nt, Artificial Sequence
  Description of Artificial Sequence: Synthetic oligonucleotide
cuuuugaacucugcuuaaauccagugg

SEQ ID NO: 280 - RNA, 27 nt, Artificial Sequence
  Description of Artificial Sequence: Synthetic oligonucleotide
gcuuuugaacucugcuuaaauccagug

SEQ ID NO: 281 - RNA, 27 nt, Artificial Sequence
  Description of Artificial Sequence: Synthetic oligonucleotide
agggcuuuugaacucugcuuaaaucca

SEQ ID NO: 282 - RNA, 27 nt, Artificial Sequence
  Description of Artificial Sequence: Synthetic oligonucleotide
aagggcuuuugaacucugcuuaaaucc

SEQ ID NO: 283 - RNA, 27 nt, Artificial Sequence
  Description of Artificial Sequence: Synthetic oligonucleotide
ugaagggcuuuugaacucugcuuaaau

SEQ ID NO: 284 - RNA, 27 nt, Artificial Sequence
  Description of Artificial Sequence: Synthetic oligonucleotide
cugaagggcuuuugaacucugcuuaaa

SEQ ID NO: 285 - RNA, 27 nt, Artificial Sequence
  Description of Artificial Sequence: Synthetic oligonucleotide
cgcugaagggcuuuugaacucugcuua

SEQ ID NO: 286 - RNA, 27 nt, Artificial Sequence
  Description of Artificial Sequence: Synthetic oligonucleotide
cgagcggcuucacucagacccugaggc

SEQ ID NO: 287 - RNA, 27 nt, Artificial Sequence
  Description of Artificial Sequence: Synthetic oligonucleotide
uugacuggcgugauguaguugcuuggg

SEQ ID NO: 288 - RNA, 27 nt, Artificial Sequence
  Description of Artificial Sequence: Synthetic oligonucleotide
cacgcaccaagaagcugccauugaucc

SEQ ID NO: 289 - RNA, 27 nt, Artificial Sequence
  Description of Artificial Sequence: Synthetic oligonucleotide
cugaugaauccaaugugggcuggaauc

SEQ ID NO: 290 - RNA, 27 nt, Artificial Sequence
  Description of Artificial Sequence: Synthetic oligonucleotide
cuuagguauuccacauucucagcugug

SEQ ID NO: 291 - RNA, 27 nt, Artificial Sequence
  Description of Artificial Sequence: Synthetic oligonucleotide
ugagccucaaauuaggagauacguuuu

SEQ ID NO: 292 - RNA, 27 nt, Artificial Sequence
  Description of Artificial Sequence: Synthetic oligonucleotide
ccaauuguagagaaauuauuuuaggaa

SEQ ID NO: 293 - RNA, 27 nt, Artificial Sequence
  Description of Artificial Sequence: Synthetic oligonucleotide
ggcuccuaacuagcugaaucuuccaau

SEQ ID NO: 294 - RNA, 27 nt, Artificial Sequence
  Description of Artificial Sequence: Synthetic oligonucleotide
guggauauugacuaggagaguuuaaaa

SEQ ID NO: 295 - RNA, 27 nt, Artificial Sequence
  Description of Artificial Sequence: Synthetic oligonucleotide
ugugacugaacauaacuguaggcugaa

SEQ ID NO: 296 - RNA, 27 nt, Artificial Sequence
  Description of Artificial Sequence: Synthetic oligonucleotide
guaugugugugugacugaacauaacug

SEQ ID NO: 297 - RNA, 27 nt, Artificial Sequence
  Description of Artificial Sequence: Synthetic oligonucleotide
aagcaaaaggaacauuuuguaugugug

SEQ ID NO: 298 - RNA, 27 nt, Artificial Sequence
  Description of Artificial Sequence: Synthetic oligonucleotide
aaaaauuacuuuaaaagcaaaaggaac

SEQ ID NO: 299 - RNA, 27 nt, Artificial Sequence
  Description of Artificial Sequence: Synthetic oligonucleotide
ccauugacuguugcuucacaggucaga

SEQ ID NO: 300 - RNA, 27 nt, Artificial Sequence
  Description of Artificial Sequence: Synthetic oligonucleotide
auugguuugucgaugugugagauaguu

SEQ ID NO: 301 - RNA, 27 nt, Artificial Sequence
  Description of Artificial Sequence: Synthetic oligonucleotide
agugguagcaguacaauugaggacaag

SEQ ID NO: 302 - RNA, 27 nt, Artificial Sequence
  Description of Artificial Sequence: Synthetic oligonucleotide
uaagaccgcuugccagcuacgguuuca

SEQ ID NO: 303 - RNA, 27 nt, Artificial Sequence
  Description of Artificial Sequence: Synthetic oligonucleotide
agccgguaagaccgcuugccagcuacg

SEQ ID NO: 304 - RNA, 27 nt, Artificial Sequence
  Description of Artificial Sequence: Synthetic oligonucleotide
gguaacccaucuuuuaaccauacaacu

SEQ ID NO: 305 - RNA, 27 nt, Artificial Sequence
  Description of Artificial Sequence: Synthetic oligonucleotide
ucgcagguaacccaucuuuuaaccaua

SEQ ID NO: 306 - RNA, 27 nt, Artificial Sequence
  Description of Artificial Sequence: Synthetic oligonucleotide
cucagcaagauuguauaauucccugca

SEQ ID NO: 307 - RNA, 27 nt, Artificial Sequence
  Description of Artificial Sequence: Synthetic oligonucleotide
acuguuuuaugcucagcaagauuguau

SEQ ID NO: 308 - RNA, 27 nt, Artificial Sequence
  Description of Artificial Sequence: Synthetic oligonucleotide
aggauaaaggacucuucauuauuggaa

SEQ ID NO: 309 - RNA, 27 nt, Artificial Sequence
  Description of Artificial Sequence: Synthetic oligonucleotide
caacuugcguuggaacauccaaagugu

SEQ ID NO: 310 - RNA, 27 nt, Artificial Sequence
  Description of Artificial Sequence: Synthetic oligonucleotide
augguuucaguuuaguggaagcauuua

SEQ ID NO: 311 - RNA, 27 nt, Artificial Sequence
  Description of Artificial Sequence: Synthetic oligonucleotide
auauuuaacaaagucaaacuuucucac

SEQ ID NO: 312 - RNA, 27 nt, Artificial Sequence
  Description of Artificial Sequence: Synthetic oligonucleotide
aacuuuuaauauacaguaguucuuuuc

SEQ ID NO: 313 - RNA, 27 nt, Artificial Sequence
  Description of Artificial Sequence: Synthetic oligonucleotide
guuaagucaaaacccguauuucuaaag

SEQ ID NO: 314 - RNA, 27 nt, Artificial Sequence
  Description of Artificial Sequence: Synthetic oligonucleotide
gugcugaguuugcuguacccauguuga

SEQ ID NO: 315 - RNA, 27 nt, Artificial Sequence
  Description of Artificial Sequence: Synthetic oligonucleotide
ugaggucagcaucuucugugucuuuac

SEQ ID NO: 316 - RNA, 27 nt, Artificial Sequence
  Description of Artificial Sequence: Synthetic oligonucleotide
gcgaucugaauaaaccucccuacuagc

SEQ ID NO: 317 - RNA, 27 nt, Artificial Sequence
  Description of Artificial Sequence: Synthetic oligonucleotide
aucccagaacccugcugcagaaggcca

SEQ ID NO: 318 - RNA, 27 nt, Artificial Sequence
  Description of Artificial Sequence: Synthetic oligonucleotide
cauaauuuccaauauguaccagaccuu

SEQ ID NO: 319 - RNA, 27 nt, Artificial Sequence
  Description of Artificial Sequence: Synthetic oligonucleotide
cuagugcuuccaucggaaggacuaggu

SEQ ID NO: 320 - RNA, 27 nt, Artificial Sequence
  Description of Artificial Sequence: Synthetic oligonucleotide
uccacauaaaaacaauauucacuggga

SEQ ID NO: 321 - RNA, 27 nt, Artificial Sequence
  Description of Artificial Sequence: Synthetic oligonucleotide
ucuaccaauuccaacuugaauucauug

SEQ ID NO: 322 - RNA, 27 nt, Artificial Sequence
  Description of Artificial Sequence: Synthetic oligonucleotide
ucuccaagucuaaaucuguguccugag

SEQ ID NO: 323 - RNA, 27 nt, Artificial Sequence
  Description of Artificial Sequence: Synthetic oligonucleotide
uggaauacuguaacugugcuuugagga

SEQ ID NO: 324 - RNA, 27 nt, Artificial Sequence
  Description of Artificial Sequence: Synthetic oligonucleotide
uuaauucaucagugguggcagugguag

SEQ ID NO: 325 - RNA, 27 nt, Artificial Sequence
  Description of Artificial Sequence: Synthetic oligonucleotide
gugaugauguggcacuaguaguuucuu

SEQ ID NO: 326 - RNA, 27 nt, Artificial Sequence
  Description of Artificial Sequence: Synthetic oligonucleotide
ucuguuuggugaggcuguccgacuuug

SEQ ID NO: 327 - RNA, 27 nt, Artificial Sequence
  Description of Artificial Sequence: Synthetic oligonucleotide
ccaucauguuccauuuuucgcuuucuc

SEQ ID NO: 328 - RNA, 27 nt, Artificial Sequence
  Description of Artificial Sequence: Synthetic oligonucleotide
gcagucuacaugcuaaaucagagggua

SEQ ID NO: 329 - RNA, 27 nt, Artificial Sequence
  Description of Artificial Sequence: Synthetic oligonucleotide
cauaaauagauccuuaaauagcucaaa

SEQ ID NO: 330 - RNA, 27 nt, Artificial Sequence
  Description of Artificial Sequence: Synthetic oligonucleotide
ugauaauagugcuuuuucaccuuuuuc

SEQ ID NO: 331 - RNA, 27 nt, Artificial Sequence
  Description of Artificial Sequence: Synthetic oligonucleotide
gcagaacugauaauagugcuuuuucac

SEQ ID NO: 332 - RNA, 27 nt, Artificial Sequence
  Description of Artificial Sequence: Synthetic oligonucleotide
guagguuuaaucuuucuuuucagccau

SEQ ID NO: 333 - RNA, 27 nt, Artificial Sequence
  Description of Artificial Sequence: Synthetic oligonucleotide
agaaggauuuuauuauaaggguuuaau

SEQ ID NO: 334 - RNA, 27 nt, Artificial Sequence
  Description of Artificial Sequence: Synthetic oligonucleotide
gucuacagcauuggcuaauaguaugaa

SEQ ID NO: 335 - RNA, 27 nt, Artificial Sequence
  Description of Artificial Sequence: Synthetic oligonucleotide
cuauuccuaucaaaaugcuucugucua

SEQ ID NO: 336 - RNA, 27 nt, Artificial Sequence
  Description of Artificial Sequence: Synthetic oligonucleotide
ucagggccauuaucuuauuugcucuau

SEQ ID NO: 337 - RNA, 27 nt, Artificial Sequence
  Description of Artificial Sequence: Synthetic oligonucleotide
ugcuugaggaagagaaaaauguugguc

SEQ ID NO: 338 - RNA, 27 nt, Artificial Sequence
  Description of Artificial Sequence: Synthetic oligonucleotide
ugggcugaacuuuucucauacuuaaag

SEQ ID NO: 339 - RNA, 27 nt, Artificial Sequence
  Description of Artificial Sequence: Synthetic oligonucleotide
gguucagcagccaucuuuauuccugcg

SEQ ID NO: 340 - RNA, 27 nt, Artificial Sequence
  Description of Artificial Sequence: Synthetic oligonucleotide
ugaagagaacuuggucauucaaauuuc

SEQ ID NO: 341 - RNA, 27 nt, Artificial Sequence
  Description of Artificial Sequence: Synthetic oligonucleotide
cucuaggcuggcuaucuuuauacauac

SEQ ID NO: 342 - RNA, 27 nt, Artificial Sequence
  Description of Artificial Sequence: Synthetic oligonucleotide
acacuucacagagauaguuacagccau

SEQ ID NO: 343 - RNA, 27 nt, Artificial Sequence
  Description of Artificial Sequence: Synthetic oligonucleotide
uugaaauuuucucacacuucacagaga

SEQ ID NO: 344 - RNA, 27 nt, Artificial Sequence
  Description of Artificial Sequence: Synthetic oligonucleotide
ucaggaggauucauuuccuuaaaggaa

SEQ ID NO: 345 - RNA, 27 nt, Artificial Sequence
  Description of Artificial Sequence: Synthetic oligonucleotide
auaugaugucacuuuuuguauccuuga

SEQ ID NO: 346 - RNA, 27 nt, Artificial Sequence
  Description of Artificial Sequence: Synthetic oligonucleotide
uaugaugaagauucaaauugcaucuua

SEQ ID NO: 347 - RNA, 27 nt, Artificial Sequence
  Description of Artificial Sequence: Synthetic oligonucleotide
uuaauagcuagucuucguuuugaacag

SEQ ID NO: 348 - RNA, 27 nt, Artificial Sequence
  Description of Artificial Sequence: Synthetic oligonucleotide
auuuuuaguagagaugagguuucacca

SEQ ID NO: 349 - RNA, 27 nt, Artificial Sequence
  Description of Artificial Sequence: Synthetic oligonucleotide
aggcgagauagagcuucucuuucguuc

SEQ ID NO: 350 - RNA, 27 nt, Artificial Sequence
  Description of Artificial Sequence: Synthetic oligonucleotide
aacuggaccgaaggcgcuuguggagaa

SEQ ID NO: 351 - RNA, 27 nt, Artificial Sequence
  Description of Artificial Sequence: Synthetic oligonucleotide
gcggcuacaucuuuggaaucuucuccu

SEQ ID NO: 352 - RNA, 27 nt, Artificial Sequence
  Description of Artificial Sequence: Synthetic oligonucleotide
caagucuccucauugaauccagauugg

SEQ ID NO: 353 - RNA, 27 nt, Artificial Sequence
  Description of Artificial Sequence: Synthetic oligonucleotide
uccucacuacucucaaaucuguucugg

SEQ ID NO: 354 - RNA, 27 nt, Artificial Sequence
  Description of Artificial Sequence: Synthetic oligonucleotide
uuuguacucaucugcacagcucuggcu

SEQ ID NO: 355 - RNA, 27 nt, Artificial Sequence
  Description of Artificial Sequence: Synthetic oligonucleotide
gcccauuaacaacaacaaucugaggug

SEQ ID NO: 356 - RNA, 27 nt, Artificial Sequence
  Description of Artificial Sequence: Synthetic oligonucleotide
aauaaauuaaaaauaauuaaaauagug

SEQ ID NO: 357 - RNA, 27 nt, Artificial Sequence
  Description of Artificial Sequence: Synthetic oligonucleotide
cauauuuaaauauuaauaaauuaaaaa

SEQ ID NO: 358 - RNA, 27 nt, Artificial Sequence
  Description of Artificial Sequence: Synthetic oligonucleotide
gaaacaaaggauauucaaacugcauag

SEQ ID NO: 359 - RNA, 27 nt, Artificial Sequence
  Description of Artificial Sequence: Synthetic oligonucleotide
caaacacuuagacgccagcagcauggg

SEQ ID NO: 360 - RNA, 27 nt, Artificial Sequence
  Description of Artificial Sequence: Synthetic oligonucleotide
uuugucacaggugaaaugcacaucuga

SEQ ID NO: 361 - RNA, 27 nt, Artificial Sequence
  Description of Artificial Sequence: Synthetic oligonucleotide
uaauucagccuggcacagguuuugauc

SEQ ID NO: 362 - RNA, 27 nt, Artificial Sequence
  Description of Artificial Sequence: Synthetic oligonucleotide
auuguaagaaugacuacccacauucac

SEQ ID NO: 363 - RNA, 27 nt, Artificial Sequence
  Description of Artificial Sequence: Synthetic oligonucleotide
caauuguaagaaugacuacccacauuc

SEQ ID NO: 364 - RNA, 27 nt, Artificial Sequence
  Description of Artificial Sequence: Synthetic oligonucleotide
guacacucucugaugcucauuuucaua

SEQ ID NO: 365 - RNA, 27 nt, Artificial Sequence
  Description of Artificial Sequence: Synthetic oligonucleotide
cugcugaguucuacaugaaaagcaaau

SEQ ID NO: 366 - RNA, 27 nt, Artificial Sequence
  Description of Artificial Sequence: Synthetic oligonucleotide
uacugaaaauaaauauagaaauacaac

SEQ ID NO: 367 - RNA, 27 nt, Artificial Sequence
  Description of Artificial Sequence: Synthetic oligonucleotide
uuccauuuaagaaacauuaaucaaaac

SEQ ID NO: 368 - RNA, 27 nt, Artificial Sequence
  Description of Artificial Sequence: Synthetic oligonucleotide
acaauuuuaggcacuauacacguuguu

SEQ ID NO: 369 - RNA, 27 nt, Artificial Sequence
  Description of Artificial Sequence: Synthetic oligonucleotide
ccagauguuaguagccaaggauauggu

SEQ ID NO: 370 - RNA, 27 nt, Artificial Sequence
  Description of Artificial Sequence: Synthetic oligonucleotide
agcucacagucuccagauguuaguagc

SEQ ID NO: 371 - RNA, 27 nt, Artificial Sequence
  Description of Artificial Sequence: Synthetic oligonucleotide
auuaauaaaaagcacacaacuuauggc

SEQ ID NO: 372 - RNA, 27 nt, Artificial Sequence
  Description of Artificial Sequence: Synthetic oligonucleotide
aauguaagaagagccaaaaugaugcau

SEQ ID NO: 373 - RNA, 27 nt, Artificial Sequence
  Description of Artificial Sequence: Synthetic oligonucleotide
acauuuuuacaaauguaagaagagcca

SEQ ID NO: 374 - RNA, 27 nt, Artificial Sequence
  Description of Artificial Sequence: Synthetic oligonucleotide
aauaugaauuaagaugaccuaaucugu

SEQ ID NO: 375 - RNA, 27 nt, Artificial Sequence
  Description of Artificial Sequence: Synthetic oligonucleotide
ucaugauuaguucuuucaauuccaucc

SEQ ID NO: 376 - RNA, 27 nt, Artificial Sequence
  Description of Artificial Sequence: Synthetic oligonucleotide
cccaagagcagaaggaaugagugugca

SEQ ID NO: 377 - RNA, 27 nt, Artificial Sequence
  Description of Artificial Sequence: Synthetic oligonucleotide
cucaaagcuacugguuaccucuacacc

SEQ ID NO: 378 - RNA, 27 nt, Artificial Sequence
  Description of Artificial Sequence: Synthetic oligonucleotide
ugaaauauuacguggcaugugguuggg

SEQ ID NO: 379 - RNA, 27 nt, Artificial Sequence
  Description of Artificial Sequence: Synthetic oligonucleotide
agugaagagaauaacuuguuuccgaag

SEQ ID NO: 380 - RNA, 27 nt, Artificial Sequence
  Description of Artificial Sequence: Synthetic oligonucleotide
uuucuuagcauuaguuauugggaguga

SEQ ID NO: 381 - RNA, 27 nt, Artificial Sequence
  Description of Artificial Sequence: Synthetic oligonucleotide
uugauuuucagcauuucuuagcauuag

SEQ ID NO: 382 - RNA, 27 nt, Artificial Sequence
  Description of Artificial Sequence: Synthetic oligonucleotide
aaaguaaucauauuuagagaaagacag

SEQ ID NO: 383 - RNA, 27 nt, Artificial Sequence
  Description of Artificial Sequence: Synthetic oligonucleotide
uguagaacaaaaugccugaaauucagc

SEQ ID NO: 384 - RNA, 27 nt, Artificial Sequence
  Description of Artificial Sequence: Synthetic oligonucleotide
gagagucccgggugagagggaaucgcc

SEQ ID NO: 385 - RNA, 27 nt, Artificial Sequence
  Description of Artificial Sequence: Synthetic oligonucleotide
cuuuacuuuaaagguucacuuuccuug

SEQ ID NO: 386 - RNA, 27 nt, Artificial Sequence
  Description of Artificial Sequence: Synthetic oligonucleotide
ccaggcuuccagagcaugcagccuccu

SEQ ID NO: 387 - RNA, 27 nt, Artificial Sequence
  Description of Artificial Sequence: Synthetic oligonucleotide
cucucuuuuguuuucuguucagagaaa

SEQ ID NO: 388 - RNA, 27 nt, Artificial Sequence
  Description of Artificial Sequence: Synthetic oligonucleotide
cggcauaacugauuacagccaaguuca

SEQ ID NO: 389 - RNA, 27 nt, Artificial Sequence
  Description of Artificial Sequence: Synthetic oligonucleotide
uggacuucuuuuaauuuuggcuucuuc

SEQ ID NO: 390 - RNA, 27 nt, Artificial Sequence
  Description of Artificial Sequence: Synthetic oligonucleotide
uaaccucaccuggacuucuuuuaauuu

SEQ ID NO: 391 - RNA, 27 nt, Artificial Sequence
  Description of Artificial Sequence: Synthetic oligonucleotide
guccucuucccgauaauccggauucag

SEQ ID NO: 392 - RNA, 27 nt, Artificial Sequence
  Description of Artificial Sequence: Synthetic oligonucleotide
acaauacuugcuuugaugucacauuaa

SEQ ID NO: 393 - RNA, 27 nt, Artificial Sequence
  Description of Artificial Sequence: Synthetic oligonucleotide
gagugcuacaauacuugcuuugauguc

SEQ ID NO: 394 - RNA, 27 nt, Artificial Sequence
  Description of Artificial Sequence: Synthetic oligonucleotide
auuugugguuuuguuuucucucucucu

SEQ ID NO: 395 - RNA, 27 nt, Artificial Sequence
  Description of Artificial Sequence: Synthetic oligonucleotide
uguaugggcuuaaauacuacagcgagg

SEQ ID NO: 396 - RNA, 27 nt, Artificial Sequence
  Description of Artificial Sequence: Synthetic oligonucleotide
cuguaugggcuuaaauacuacagcgag

SEQ ID NO: 397 - RNA, 27 nt, Artificial Sequence
  Description of Artificial Sequence: Synthetic oligonucleotide
ggaagguuucuguaugggcuuaaauac

SEQ ID NO: 398 - RNA, 27 nt, Artificial Sequence
  Description of Artificial Sequence: Synthetic oligonucleotide
guagguauaccauguuuauuuuaauac

SEQ ID NO: 399 - RNA, 27 nt, Artificial Sequence
  Description of Artificial Sequence: Synthetic oligonucleotide
uccgaaaacuggccgaucagaacagcc

SEQ ID NO: 400 - RNA, 27 nt, Artificial Sequence
  Description of Artificial Sequence: Synthetic oligonucleotide
cccuguuccaaaguucaaauuauuugu

SEQ ID NO: 401 - RNA, 27 nt, Artificial Sequence
  Description of Artificial Sequence: Synthetic oligonucleotide
acuggaaaguuaaauuaaggucgcaau

SEQ ID NO: 402 - RNA, 27 nt, Artificial Sequence
  Description of Artificial Sequence: Synthetic oligonucleotide
caaaaccaaacuuuagcuuucucagcc

SEQ ID NO: 403 - RNA, 27 nt, Artificial Sequence
  Description of Artificial Sequence: Synthetic oligonucleotide
uacagugggaaguagcaucuuuacuuu

SEQ ID NO: 404 - RNA, 27 nt, Artificial Sequence
  Description of Artificial Sequence: Synthetic oligonucleotide
ucauaugguaucagcaauuaagcagua

SEQ ID NO: 405 - RNA, 27 nt, Artificial Sequence
  Description of Artificial Sequence: Synthetic oligonucleotide
cagcccauguuucauucauaugguauc

SEQ ID NO: 406 - RNA, 27 nt, Artificial Sequence
  Description of Artificial Sequence: Synthetic oligonucleotide
uaugaaaaaguuggauaagaaaguugg

SEQ ID NO: 407 - RNA, 27 nt, Artificial Sequence
  Description of Artificial Sequence: Synthetic oligonucleotide
uccggccucaugaugucaugcaaggcu

SEQ ID NO: 408 - RNA, 27 nt, Artificial Sequence
  Description of Artificial Sequence: Synthetic oligonucleotide
acaaaugcagucauauacaaauucagg

SEQ ID NO: 409 - RNA, 27 nt, Artificial Sequence
  Description of Artificial Sequence: Synthetic oligonucleotide
gguaguaaacauucuacuaggauucuu

SEQ ID NO: 410 - RNA, 27 nt, Artificial Sequence
  Description of Artificial Sequence: Synthetic oligonucleotide
uuucaucaaaaaauucuucccuuucug

SEQ ID NO: 411 - RNA, 27 nt, Artificial Sequence
  Description of Artificial Sequence: Synthetic oligonucleotide
aaauucacacacuggcaugccgauagc

SEQ ID NO: 412 - RNA, 27 nt, Artificial Sequence
  Description of Artificial Sequence: Synthetic oligonucleotide
acauacauugcucuacuaugaggugaa

SEQ ID NO: 413 - RNA, 27 nt, Artificial Sequence
  Description of Artificial Sequence: Synthetic oligonucleotide
uauauaugugcuuuggcaauucuggug

SEQ ID NO: 414 - RNA, 27 nt, Artificial Sequence
  Description of Artificial Sequence: Synthetic oligonucleotide
ggagaaacuauuacccagaucaccacu

SEQ ID NO: 415 - RNA, 27 nt, Artificial Sequence
  Description of Artificial Sequence: Synthetic oligonucleotide
auuuggagaaacuauuacccagaucac

SEQ ID NO: 416 - RNA, 27 nt, Artificial Sequence
  Description of Artificial Sequence: Synthetic oligonucleotide
uuucuaggaaguauucaucacauccac

SEQ ID NO: 417 - RNA, 27 nt, Artificial Sequence
  Description of Artificial Sequence: Synthetic oligonucleotide
cauauaugguguagcuguggaaaugcg

SEQ ID NO: 418 - RNA, 27 nt, Artificial Sequence
  Description of Artificial Sequence: Synthetic oligonucleotide
cuccauucauauaugguguagcugugg

SEQ ID NO: 419 - RNA, 27 nt, Artificial Sequence
  Description of Artificial Sequence: Synthetic oligonucleotide
aucuucuucucguguaagaacugcagc

SEQ ID NO: 420 - RNA, 27 nt, Artificial Sequence
  Description of Artificial Sequence: Synthetic oligonucleotide
ucccuguaaaugaucuucuucucgugu

SEQ ID NO: 421 - RNA, 27 nt, Artificial Sequence
  Description of Artificial Sequence: Synthetic oligonucleotide
gucccuguaaaugaucuucuucucgug

SEQ ID NO: 422 - RNA, 27 nt, Artificial Sequence
  Description of Artificial Sequence: Synthetic oligonucleotide
ucaggucccuguaaaugaucuucuucu

SEQ ID NO: 423 - RNA, 27 nt, Artificial Sequence
  Description of Artificial Sequence: Synthetic oligonucleotide
gaugcagucaaacaccucuuccucugu

SEQ ID NO: 424 - RNA, 27 nt, Artificial Sequence
  Description of Artificial Sequence: Synthetic oligonucleotide
cgaugcagucaaacaccucuuccucug

SEQ ID NO: 425 - RNA, 27 nt, Artificial Sequence
  Description of Artificial Sequence: Synthetic oligonucleotide
cccugugaacucgcccucaaaguagcg

SEQ ID NO: 426 - RNA, 27 nt, Artificial Sequence
  Description of Artificial Sequence: Synthetic oligonucleotide
ggacagaggugccaggagaugcccuca

SEQ ID NO: 427 - RNA, 27 nt, Artificial Sequence
  Description of Artificial Sequence: Synthetic oligonucleotide
uuaaaaagacaaaccauaucacuccuu

SEQ ID NO: 428 - RNA, 27 nt, Artificial Sequence
  Description of Artificial Sequence: Synthetic oligonucleotide
cuuaaaaagacaaaccauaucacuccu

SEQ ID NO: 429 - RNA, 27 nt, Artificial Sequence
  Description of Artificial Sequence: Synthetic oligonucleotide
gacaaccuuuaggaucuuuacugcaac

SEQ ID NO: 430 - RNA, 27 nt, Artificial Sequence
  Description of Artificial Sequence: Synthetic oligonucleotide
gucgacaaccuuuaggaucuuuacugc

SEQ ID NO: 431 - RNA, 27 nt, Artificial Sequence
  Description of Artificial Sequence: Synthetic oligonucleotide
acaauugccagguuguccuuugucaug

SEQ ID NO: 432 - RNA, 27 nt, Artificial Sequence
  Description of Artificial Sequence: Synthetic oligonucleotide
ccucgcaccacugggucacaauugcca

SEQ ID NO: 433 - RNA, 27 nt, Artificial Sequence
  Description of Artificial Sequence: Synthetic oligonucleotide
auuucaugucucuauggaugauguucu

SEQ ID NO: 434 - RNA, 27 nt, Artificial Sequence
  Description of Artificial Sequence: Synthetic oligonucleotide
uggagaaauauauuguuggauuucaug

SEQ ID NO: 435 - RNA, 27 nt, Artificial Sequence
  Description of Artificial Sequence: Synthetic oligonucleotide
agccuucauggagaaauauauuguugg

SEQ ID NO: 436 - RNA, 27 nt, Artificial Sequence
  Description of Artificial Sequence: Synthetic oligonucleotide
accacuccagcgugacuuuacuguugc

SEQ ID NO: 437 - RNA, 27 nt, Artificial Sequence
  Description of Artificial Sequence: Synthetic oligonucleotide
ccucucuuccuuuacuuucuucacaca

SEQ ID NO: 438 - RNA, 27 nt, Artificial Sequence
  Description of Artificial Sequence: Synthetic oligonucleotide
gcccgaugcaaggauggcucggaagcg

SEQ ID NO: 439 - RNA, 27 nt, Artificial Sequence
  Description of Artificial Sequence: Synthetic oligonucleotide
cacaguaggauauucaaccuccauuuc

SEQ ID NO: 440 - RNA, 27 nt, Artificial Sequence
  Description of Artificial Sequence: Synthetic oligonucleotide
uuacacaguaggauauucaaccuccau

SEQ ID NO: 441 - RNA, 27 nt, Artificial Sequence
  Description of Artificial Sequence: Synthetic oligonucleotide
uacacuacaagggaaaacucaaaaucu

SEQ ID NO: 442 - RNA, 27 nt, Artificial Sequence
  Description of Artificial Sequence: Synthetic oligonucleotide
caaucaacaaagaacaaacaggauaaa

SEQ ID NO: 443 - RNA, 27 nt, Artificial Sequence
  Description of Artificial Sequence: Synthetic oligonucleotide
uuucaaucaacaaagaacaaacaggau

SEQ ID NO: 444 - RNA, 27 nt, Artificial Sequence
  Description of Artificial Sequence: Synthetic oligonucleotide
auggaagaaaaagaaggcuguagagaa

SEQ ID NO: 445 - RNA, 27 nt, Artificial Sequence
  Description of Artificial Sequence: Synthetic oligonucleotide
uagaaggaagauuagcuauggaagaaa

SEQ ID NO: 446 - RNA, 27 nt, Artificial Sequence
  Description of Artificial Sequence: Synthetic oligonucleotide
augaagcauucaacaggaagauuauuu

SEQ ID NO: 447 - RNA, 27 nt, Artificial Sequence
  Description of Artificial Sequence: Synthetic oligonucleotide
caugaagcauucaacaggaagauuauu

SEQ ID NO: 448 - RNA, 27 nt, Artificial Sequence
  Description of Artificial Sequence: Synthetic oligonucleotide
ucaaaguagaauucaagucaugaagca

SEQ ID NO: 449 - RNA, 27 nt, Artificial Sequence
  Description of Artificial Sequence: Synthetic oligonucleotide
gucuguaguugcuucucucccucuuag

SEQ ID NO: 450 - RNA, 27 nt, Artificial Sequence
  Description of Artificial Sequence: Synthetic oligonucleotide
guugaccuuggucugguaggagacggc

SEQ ID NO: 451 - RNA, 27 nt, Artificial Sequence
  Description of Artificial Sequence: Synthetic oligonucleotide
gucgagauagucgggccgauugaucuc

SEQ ID NO: 452 - RNA, 27 nt, Artificial Sequence
  Description of Artificial Sequence: Synthetic oligonucleotide
guuugggaagguuggauguucguccuc

SEQ ID NO: 453 - RNA, 27 nt, Artificial Sequence
  Description of Artificial Sequence: Synthetic oligonucleotide
aguucuaagcuuggguuccgacccuaa

SEQ ID NO: 454 - RNA, 27 nt, Artificial Sequence
  Description of Artificial Sequence: Synthetic oligonucleotide
uuaaaguucuaagcuuggguuccgacc

SEQ ID NO: 455 - RNA, 27 nt, Artificial Sequence
  Description of Artificial Sequence: Synthetic oligonucleotide
guugcuuaaaguucuaagcuuggguuc

SEQ ID NO: 456 - RNA, 27 nt, Artificial Sequence
  Description of Artificial Sequence: Synthetic oligonucleotide
gugguggucuuguugcuuaaaguucua

SEQ ID NO: 457 - RNA, 27 nt, Artificial Sequence
  Description of Artificial Sequence: Synthetic oligonucleotide
acuuuauuucucgccacugaauaguag

SEQ ID NO: 458 - RNA, 27 nt, Artificial Sequence
  Description of Artificial Sequence: Synthetic oligonucleotide
aacuuuauuucucgccacugaauagua

SEQ ID NO: 459 - RNA, 27 nt, Artificial Sequence
  Description of Artificial Sequence: Synthetic oligonucleotide
ggaucauuuccuguuaucuguguuugu

SEQ ID NO: 460 - RNA, 27 nt, Artificial Sequence
  Description of Artificial Sequence: Synthetic oligonucleotide
guuucauuucuucucuuuucuuaaggc

SEQ ID NO: 461 - RNA, 27 nt, Artificial Sequence
  Description of Artificial Sequence: Synthetic oligonucleotide
ggaggauggaaacacacuccuucaguu

SEQ ID NO: 462 - RNA, 27 nt, Artificial Sequence
  Description of Artificial Sequence: Synthetic oligonucleotide
ucaaagauuuucagucccgcggugaca

SEQ ID NO: 463 - RNA, 27 nt, Artificial Sequence
  Description of Artificial Sequence: Synthetic oligonucleotide
ccugaacggcacgcuuauuucugcugu

SEQ ID NO: 464 - RNA, 27 nt, Artificial Sequence
  Description of Artificial Sequence: Synthetic oligonucleotide
cuucuggacccugaacggcacgcuuau

SEQ ID NO: 465 - RNA, 27 nt, Artificial Sequence
  Description of Artificial Sequence: Synthetic oligonucleotide
caagcagucuugagugacuguuucuuc

SEQ ID NO: 466 - RNA, 27 nt, Artificial Sequence
  Description of Artificial Sequence: Synthetic oligonucleotide
ccaaagacauggaccuucuuccucuga

SEQ ID NO: 467 - RNA, 27 nt, Artificial Sequence
  Description of Artificial Sequence: Synthetic oligonucleotide
guguuucaggcauauuuugaauacauc

SEQ ID NO: 468 - RNA, 27 nt, Artificial Sequence
  Description of Artificial Sequence: Synthetic oligonucleotide
gagguacagagaaagggaggaaaauag

SEQ ID NO: 469 - RNA, 27 nt, Artificial Sequence
  Description of Artificial Sequence: Synthetic oligonucleotide
ucuugucuugcucuaucuuucuuuggu

SEQ ID NO: 470 - RNA, 27 nt, Artificial Sequence
  Description of Artificial Sequence: Synthetic oligonucleotide
uuucuugucuugcucuaucuuucuuug

SEQ ID NO: 471 - RNA, 27 nt, Artificial Sequence
  Description of Artificial Sequence: Synthetic oligonucleotide
ggaucuuguacaaacaaaugcuuucuc

SEQ ID NO: 472 - RNA, 27 nt, Artificial Sequence
  Description of Artificial Sequence: Synthetic oligonucleotide
ucugcaaguacguucguuuaacucaag

SEQ ID NO: 473 - RNA, 27 nt, Artificial Sequence
  Description of Artificial Sequence: Synthetic oligonucleotide
ucuguaucgaucguucuguaucagucu

SEQ ID NO: 474 - RNA, 27 nt, Artificial Sequence
  Description of Artificial Sequence: Synthetic oligonucleotide
auuuauuuuuauauauauauaauauau

SEQ ID NO: 475 - RNA, 27 nt, Artificial Sequence
  Description of Artificial Sequence: Synthetic oligonucleotide
auauuuauuuuuauauauauauaauau

SEQ ID NO: 476 - RNA, 27 nt, Artificial Sequence
  Description of Artificial Sequence: Synthetic oligonucleotide
cacagcagucaaauacauccagugaag

SEQ ID NO: 477 - RNA, 27 nt, Artificial Sequence
  Description of Artificial Sequence: Synthetic oligonucleotide
gucucucaucuccuccucuucccuguc

SEQ ID NO: 478 - RNA, 27 nt, Artificial Sequence
  Description of Artificial Sequence: Synthetic oligonucleotide
ccaagugggacaaaaaaaagaucaugc

SEQ ID NO: 479 - RNA, 14 nt, Artificial Sequence
  Description of Artificial Sequence: Synthetic oligonucleotide
guauuuugaugagg

SEQ ID NO: 480 - RNA, 12 nt, Artificial Sequence
  Description of Artificial Sequence: Synthetic oligonucleotide
ggcccagaugau

SEQ ID NO: 481 - RNA, 14 nt, Artificial Sequence
  Description of Artificial Sequence: Synthetic oligonucleotide
gggaagaaaacuau

SEQ ID NO: 482 - RNA, 15 nt, Artificial Sequence
  Description of Artificial Sequence: Synthetic oligonucleotide
guuuuaauuuauuuc

SEQ ID NO: 483 - RNA, 12 nt, Artificial Sequence
  Description of Artificial Sequence: Synthetic oligonucleotide
acguagggaaau

SEQ ID NO: 484 - RNA, 12 nt, Artificial Sequence
  Description of Artificial Sequence: Synthetic oligonucleotide
ccaggguuuacc

SEQ ID NO: 485 - RNA, 11 nt, Artificial Sequence
  Description of Artificial Sequence: Synthetic oligonucleotide
agcaagguuua

SEQ ID NO: 486 - RNA, 12 nt, Artificial Sequence
  Description of Artificial Sequence: Synthetic oligonucleotide
uguauuauguug

SEQ ID NO: 487 - RNA, 15 nt, Artificial Sequence
  Description of Artificial Sequence: Synthetic oligonucleotide
uuuuaaucuuuguga

SEQ ID NO: 488 - RNA, 14 nt, Artificial Sequence
  Description of Artificial Sequence: Synthetic oligonucleotide
uuaaucuuugugac

SEQ ID NO: 489 - RNA, 13 nt, Artificial Sequence
  Description of Artificial Sequence: Synthetic oligonucleotide
gcugcuuaugucu

SEQ ID NO: 490 - RNA, 14 nt, Artificial Sequence
  Description of Artificial Sequence: Synthetic oligonucleotide
aaguguuucagaag

SEQ ID NO: 491 - RNA, 13 nt, Artificial Sequence
  Description of Artificial Sequence: Synthetic oligonucleotide
gaccaucaauaag

SEQ ID NO: 492 - RNA, 13 nt, Artificial Sequence
  Description of Artificial Sequence: Synthetic oligonucleotide
ccaucaauaagga

SEQ ID NO: 493 - RNA, 14 nt, Artificial Sequence
  Description of Artificial Sequence: Synthetic oligonucleotide
ucaauaaggaagaa

SEQ ID NO: 494 - RNA, 14 nt, Artificial Sequence
  Description of Artificial Sequence: Synthetic oligonucleotide
aauaaggaagaagc

SEQ ID NO: 495 - RNA, 13 nt, Artificial Sequence
  Description of Artificial Sequence: Synthetic oligonucleotide
aggaagaagcccu

SEQ ID NO: 496 - RNA, 13 nt, Artificial Sequence
  Description of Artificial Sequence: Synthetic oligonucleotide
gcauaacuaaagg

SEQ ID NO: 497 - RNA, 14 nt, Artificial Sequence
  Description of Artificial Sequence: Synthetic oligonucleotide
cauaacuaaaggug

SEQ ID NO: 498 - RNA, 12 nt, Artificial Sequence
  Description of Artificial Sequence: Synthetic oligonucleotide
cuacaucacgcc

SEQ ID NO: 499 - RNA, 12 nt, Artificial Sequence
  Description of Artificial Sequence: Synthetic oligonucleotide
acuggauuuaag

SEQ ID NO: 500 - RNA, 12 nt, Artificial Sequence
  Description of Artificial Sequence: Synthetic oligonucleotide
cuggauuuaagc

SEQ ID NO: 501 - RNA, 13 nt, Artificial Sequence
  Description of Artificial Sequence: Synthetic oligonucleotide
gauuuaagcagag

SEQ ID NO: 502 - RNA, 13 nt, Artificial Sequence
  Description of Artificial Sequence: Synthetic oligonucleotide
auuuaagcagagu

SEQ ID NO: 503 - RNA, 13 nt, Artificial Sequence
  Description of Artificial Sequence: Synthetic oligonucleotide
uuaagcagaguuc

SEQ ID NO: 504 - RNA, 13 nt, Artificial Sequence
  Description of Artificial Sequence: Synthetic oligonucleotide
uaagcagaguuca

SEQ ID NO: 505 - RNA, 14 nt, Artificial Sequence
  Description of Artificial Sequence: Synthetic oligonucleotide
agcagaguucaaaa

SEQ ID NO: 506 - RNA, 12 nt, Artificial Sequence
  Description of Artificial Sequence: Synthetic oligonucleotide
cucagggucuga

SEQ ID NO: 507 - RNA, 13 nt, Artificial Sequence
  Description of Artificial Sequence: Synthetic oligonucleotide
caagcaacuacau

SEQ ID NO: 508 - RNA, 12 nt, Artificial Sequence
  Description of Artificial Sequence: Synthetic oligonucleotide
aucaauggcagc

SEQ ID NO: 509 - RNA, 11 nt, Artificial Sequence
  Description of Artificial Sequence: Synthetic oligonucleotide
uuccagcccac

SEQ ID NO: 510 - RNA, 12 nt, Artificial Sequence
  Description of Artificial Sequence: Synthetic oligonucleotide
cagcugagaaug

SEQ ID NO: 511 - RNA, 13 nt, Artificial Sequence
  Description of Artificial Sequence: Synthetic oligonucleotide
aacguaucuccua

SEQ ID NO: 512 - RNA, 14 nt, Artificial Sequence
  Description of Artificial Sequence: Synthetic oligonucleotide
ccuaaaauaauuuc

SEQ ID NO: 513 - RNA, 13 nt, Artificial Sequence
  Description of Artificial Sequence: Synthetic oligonucleotide
uggaagauucagc

SEQ ID NO: 514 - RNA, 12 nt, Artificial Sequence
  Description of Artificial Sequence: Synthetic oligonucleotide
uuaaacucuccu

SEQ ID NO: 515 - RNA, 12 nt, Artificial Sequence
  Description of Artificial Sequence: Synthetic oligonucleotide
cagccuacaguu

SEQ ID NO: 516 - RNA, 13 nt, Artificial Sequence
  Description of Artificial Sequence: Synthetic oligonucleotide
guuauguucaguc

SEQ ID NO: 517 - RNA, 13 nt, Artificial Sequence
  Description of Artificial Sequence: Synthetic oligonucleotide
cacauacaaaaug

SEQ ID NO: 518 - RNA, 9 nt, Artificial Sequence
  Description of Artificial Sequence: Synthetic oligonucleotide
uccuuuugc

SEQ ID NO: 519 - RNA, 12 nt, Artificial Sequence
  Description of Artificial Sequence: Synthetic oligonucleotide
ugaccugugaag

SEQ ID NO: 520 - RNA, 12 nt, Artificial Sequence
  Description of Artificial Sequence: Synthetic oligonucleotide
cuaucucacaca

SEQ ID NO: 521 - RNA, 13 nt, Artificial Sequence
  Description of Artificial Sequence: Synthetic oligonucleotide
uguccucaauugu

SEQ ID NO: 522 - RNA, 12 nt, Artificial Sequence
  Description of Artificial Sequence: Synthetic oligonucleotide
aaaccguagcug

SEQ ID NO: 523 - RNA, 12 nt, Artificial Sequence
  Description of Artificial Sequence: Synthetic oligonucleotide
uagcuggcaagc

SEQ ID NO: 524 - RNA, 14 nt, Artificial Sequence
  Description of Artificial Sequence: Synthetic oligonucleotide
uuguaugguuaaaa

SEQ ID NO: 525 - RNA, 14 nt, Artificial Sequence
  Description of Artificial Sequence: Synthetic oligonucleotide
ugguuaaaagaugg

SEQ ID NO: 526 - RNA, 13 nt, Artificial Sequence
  Description of Artificial Sequence: Synthetic oligonucleotide
cagggaauuauac

SEQ ID NO: 527 - RNA, 12 nt, Artificial Sequence
  Description of Artificial Sequence: Synthetic oligonucleotide
acaaucuugcug

SEQ ID NO: 528 - RNA, 13 nt, Artificial Sequence
  Description of Artificial Sequence: Synthetic oligonucleotide
ccaauaaugaaga

SEQ ID NO: 529 - RNA, 13 nt, Artificial Sequence
  Description of Artificial Sequence: Synthetic oligonucleotide
acuuuggauguuc

SEQ ID NO: 530 - RNA, 12 nt, Artificial Sequence
  Description of Artificial Sequence: Synthetic oligonucleotide
aaugcuuccacu

SEQ ID NO: 531 - RNA, 11 nt, Artificial Sequence
  Description of Artificial Sequence: Synthetic oligonucleotide
gagaaaguuug

SEQ ID NO: 532 - RNA, 11 nt, Artificial Sequence
  Description of Artificial Sequence: Synthetic oligonucleotide
aaagaacuacu

SEQ ID NO: 533 - RNA, 12 nt, Artificial Sequence
  Description of Artificial Sequence: Synthetic oligonucleotide
uuagaaauacgg

SEQ ID NO: 534 - RNA, 12 nt, Artificial Sequence
  Description of Artificial Sequence: Synthetic oligonucleotide
aacauggguaca

SEQ ID NO: 535 - RNA, 14 nt, Artificial Sequence
  Description of Artificial Sequence: Synthetic oligonucleotide
aaagacacagaaga

SEQ ID NO: 536 - RNA, 11 nt, Artificial Sequence
  Description of Artificial Sequence: Synthetic oligonucleotide
uaguagggagg

SEQ ID NO: 537 - RNA, 12 nt, Artificial Sequence
  Description of Artificial Sequence: Synthetic oligonucleotide
gccuucugcagc

SEQ ID NO: 538 - RNA, 10 nt, Artificial Sequence
  Description of Artificial Sequence: Synthetic oligonucleotide
ggucugguac

SEQ ID NO: 539 - RNA, 12 nt, Artificial Sequence
  Description of Artificial Sequence: Synthetic oligonucleotide
cuaguccuuccg

SEQ ID NO: 540 - RNA, 12 nt, Artificial Sequence
  Description of Artificial Sequence: Synthetic oligonucleotide
ccagugaauauu

SEQ ID NO: 541 - RNA, 13 nt, Artificial Sequence
  Description of Artificial Sequence: Synthetic oligonucleotide
augaauucaaguu

SEQ ID NO: 542 - RNA, 12 nt, Artificial Sequence
  Description of Artificial Sequence: Synthetic oligonucleotide
caggacacagau

SEQ ID NO: 543 - RNA, 12 nt, Artificial Sequence
  Description of Artificial Sequence: Synthetic oligonucleotide
cucaaagcacag

SEQ ID NO: 544 - RNA, 10 nt, Artificial Sequence
  Description of Artificial Sequence: Synthetic oligonucleotide
accacugcca

SEQ ID NO: 545 - RNA, 13 nt, Artificial Sequence
  Description of Artificial Sequence: Synthetic oligonucleotide
gaaacuacuagug

SEQ ID NO: 546 - RNA, 12 nt, Artificial Sequence
  Description of Artificial Sequence: Synthetic oligonucleotide
aagucggacagc

SEQ ID NO: 547 - RNA, 13 nt, Artificial Sequence
  Description of Artificial Sequence: Synthetic oligonucleotide
gaaagcgaaaaau

SEQ ID NO: 548 - RNA, 13 nt, Artificial Sequence
  Description of Artificial Sequence: Synthetic oligonucleotide
cccucugauuuag

SEQ ID NO: 549 - RNA, 12 nt, Artificial Sequence
  Description of Artificial Sequence: Synthetic oligonucleotide
ugagcuauuuaa

SEQ ID NO: 550 - RNA, 13 nt, Artificial Sequence
  Description of Artificial Sequence: Synthetic oligonucleotide
aaaaggugaaaaa

SEQ ID NO: 551 - RNA, 14 nt, Artificial Sequence
  Description of Artificial Sequence: Synthetic oligonucleotide
gaaaaagcacuauu

SEQ ID NO: 552 - RNA, 12 nt, Artificial Sequence
  Description of Artificial Sequence: Synthetic oligonucleotide
ggcugaaaagaa

SEQ ID NO: 553 - RNA, 12 nt, Artificial Sequence
  Description of Artificial Sequence: Synthetic oligonucleotide
uaaacccuuaua

SEQ ID NO: 554 - RNA, 13 nt, Artificial Sequence
  Description of Artificial Sequence: Synthetic oligonucleotide
cauacuauuagcc

SEQ ID NO: 555 - RNA, 12 nt, Artificial Sequence
  Description of Artificial Sequence: Synthetic oligonucleotide
gacagaagcauu

SEQ ID NO: 556 - RNA, 14 nt, Artificial Sequence
  Description of Artificial Sequence: Synthetic oligonucleotide
agagcaaauaagau

SEQ ID NO: 557 - RNA, 14 nt, Artificial Sequence
  Description of Artificial Sequence: Synthetic oligonucleotide
ccaacauuuuucuc

SEQ ID NO: 558 - RNA, 15 nt, Artificial Sequence
  Description of Artificial Sequence: Synthetic oligonucleotide
uuaaguaugagaaaa

SEQ ID NO: 559 - RNA, 14 nt, Artificial Sequence
  Description of Artificial Sequence: Synthetic oligonucleotide
caggaauaaagaug

SEQ ID NO: 560 - RNA, 13 nt, Artificial Sequence
  Description of Artificial Sequence: Synthetic oligonucleotide
aauuugaaugacc

SEQ ID NO: 561 - RNA, 14 nt, Artificial Sequence
  Description of Artificial Sequence: Synthetic oligonucleotide
auguauaaagauag

SEQ ID NO: 562 - RNA, 12 nt, Artificial Sequence
  Description of Artificial Sequence: Synthetic oligonucleotide
ggcuguaacuau

SEQ ID NO: 563 - RNA, 11 nt, Artificial Sequence
  Description of Artificial Sequence: Synthetic oligonucleotide
ucugugaagug

SEQ ID NO: 564 - RNA, 14 nt, Artificial Sequence
  Description of Artificial Sequence: Synthetic oligonucleotide
ccuuuaaggaaaug

SEQ ID NO: 565 - RNA, 13 nt, Artificial Sequence
  Description of Artificial Sequence: Synthetic oligonucleotide
aaggauacaaaaa

SEQ ID NO: 566 - RNA, 12 nt, Artificial Sequence
  Description of Artificial Sequence: Synthetic oligonucleotide
agaugcaauuug

SEQ ID NO: 567 - RNA, 12 nt, Artificial Sequence
  Description of Artificial Sequence: Synthetic oligonucleotide
guucaaaacgaa

SEQ ID NO: 568 - RNA, 11 nt, Artificial Sequence
  Description of Artificial Sequence: Synthetic oligonucleotide
gugaaaccuca

SEQ ID NO: 569 - RNA, 13 nt, Artificial Sequence
  Description of Artificial Sequence: Synthetic oligonucleotide
acgaaagagaagc

SEQ ID NO: 570 - RNA, 12 nt, Artificial Sequence
  Description of Artificial Sequence: Synthetic oligonucleotide
cuccacaagcgc

SEQ ID NO: 571 - RNA, 14 nt, Artificial Sequence
  Description of Artificial Sequence: Synthetic oligonucleotide
gagaagauuccaaa

SEQ ID NO: 572 - RNA, 13 nt, Artificial Sequence
  Description of Artificial Sequence: Synthetic oligonucleotide
aaucuggauucaa

SEQ ID NO: 573 - RNA, 13 nt, Artificial Sequence
  Description of Artificial Sequence: Synthetic oligonucleotide
agaacagauuuga

SEQ ID NO: 574 - RNA, 11 nt, Artificial Sequence
  Description of Artificial Sequence: Synthetic oligonucleotide
ccagagcugug

SEQ ID NO: 575 - RNA, 12 nt, Artificial Sequence
  Description of Artificial Sequence: Synthetic oligonucleotide
ccucagauuguu

SEQ ID NO: 576 - RNA, 12 nt, Artificial Sequence
  Description of Artificial Sequence: Synthetic oligonucleotide
cuauuuuaauua

SEQ ID NO: 577 - RNA, 13 nt, Artificial Sequence
  Description of Artificial Sequence: Synthetic oligonucleotide
uuuaauuuauuaa

SEQ ID NO: 578 - RNA, 12 nt, Artificial Sequence
  Description of Artificial Sequence: Synthetic oligonucleotide
augcaguuugaa

SEQ ID NO: 579 - RNA, 11 nt, Artificial Sequence
  Description of Artificial Sequence: Synthetic oligonucleotide
caugcugcugg

SEQ ID NO: 580 - RNA, 13 nt, Artificial Sequence
  Description of Artificial Sequence: Synthetic oligonucleotide
agaugugcauuuc

SEQ ID NO: 581 - RNA, 12 nt, Artificial Sequence
  Description of Artificial Sequence: Synthetic oligonucleotide
ucaaaaccugug

SEQ ID NO: 582 - RNA, 11 nt, Artificial Sequence
  Description of Artificial Sequence: Synthetic oligonucleotide
gaaugugggua

SEQ ID NO: 583 - RNA, 10 nt, Artificial Sequence
  Description of Artificial Sequence: Synthetic oligonucleotide
auguggguag

SEQ ID NO: 584 - RNA, 13 nt, Artificial Sequence
  Description of Artificial Sequence: Synthetic oligonucleotide
ugaaaaugagcau

SEQ ID NO: 585 - RNA, 13 nt, Artificial Sequence
  Description of Artificial Sequence: Synthetic oligonucleotide
uugcuuuucaugu

SEQ ID NO: 586 - RNA, 12 nt, Artificial Sequence
  Description of Artificial Sequence: Synthetic oligonucleotide
uguauuucuaua

SEQ ID NO: 587 - RNA, 13 nt, Artificial Sequence
  Description of Artificial Sequence: Synthetic oligonucleotide
uuugauuaauguu

SEQ ID NO: 588 - RNA, 12 nt, Artificial Sequence
  Description of Artificial Sequence: Synthetic oligonucleotide
caacguguauag

SEQ ID NO: 589 - RNA, 12 nt, Artificial Sequence
  Description of Artificial Sequence: Synthetic oligonucleotide
cauauccuuggc

SEQ ID NO: 590 - RNA, 13 nt, Artificial Sequence
  Description of Artificial Sequence: Synthetic oligonucleotide
uacuaacaucugg

SEQ ID NO: 591 - RNA, 11 nt, Artificial Sequence
  Description of Artificial Sequence: Synthetic oligonucleotide
cauaaguugug

SEQ ID NO: 592 - RNA, 12 nt, Artificial Sequence
  Description of Artificial Sequence: Synthetic oligonucleotide
gcaucauuuugg

SEQ ID NO: 593 - RNA, 10 nt, Artificial Sequence
  Description of Artificial Sequence: Synthetic oligonucleotide
gcucuucuua

SEQ ID NO: 594 - RNA, 10 nt, Artificial Sequence
  Description of Artificial Sequence: Synthetic oligonucleotide
agauuagguc

SEQ ID NO: 595 - RNA, 12 nt, Artificial Sequence
  Description of Artificial Sequence: Synthetic oligonucleotide
auggaauugaaa

SEQ ID NO: 596 - RNA, 13 nt, Artificial Sequence
  Description of Artificial Sequence: Synthetic oligonucleotide
cacacucauuccu

SEQ ID NO: 597 - RNA, 12 nt, Artificial Sequence
  Description of Artificial Sequence: Synthetic oligonucleotide
uguagagguaac

SEQ ID NO: 598 - RNA, 11 nt, Artificial Sequence
  Description of Artificial Sequence: Synthetic oligonucleotide
caaccacaugc

SEQ ID NO: 599 - RNA, 12 nt, Artificial Sequence
  Description of Artificial Sequence: Synthetic oligonucleotide
ucggaaacaagu

SEQ ID NO: 600 - RNA, 11 nt, Artificial Sequence
  Description of Artificial Sequence: Synthetic oligonucleotide
acucccaauaa

SEQ ID NO: 601 - RNA, 13 nt, Artificial Sequence
  Description of Artificial Sequence: Synthetic oligonucleotide
aaugcuaagaaau

SEQ ID NO: 602 - RNA, 11 nt, Artificial Sequence
  Description of Artificial Sequence: Synthetic oligonucleotide
gucuuucucua

SEQ ID NO: 603 - RNA, 11 nt, Artificial Sequence
  Description of Artificial Sequence: Synthetic oligonucleotide
ugaauuucagg

SEQ ID NO: 604 - RNA, 13 nt, Artificial Sequence
  Description of Artificial Sequence: Synthetic oligonucleotide
cgauucccucuca

SEQ ID NO: 605 - RNA, 11 nt, Artificial Sequence
  Description of Artificial Sequence: Synthetic oligonucleotide
aggaaagugaa

SEQ ID NO: 606 - RNA, 12 nt, Artificial Sequence
  Description of Artificial Sequence: Synthetic oligonucleotide
gaggcugcaugc

SEQ ID NO: 607 - RNA, 11 nt, Artificial Sequence
  Description of Artificial Sequence: Synthetic oligonucleotide
ucucugaacag

SEQ ID NO: 608 - RNA, 12 nt, Artificial Sequence
  Description of Artificial Sequence: Synthetic oligonucleotide
aacuuggcugua

SEQ ID NO: 609 - RNA, 12 nt, Artificial Sequence
  Description of Artificial Sequence: Synthetic oligonucleotide
agaagccaaaau

SEQ ID NO: 610 - RNA, 14 nt, Artificial Sequence
  Description of Artificial Sequence: Synthetic oligonucleotide
auuaaaagaagucc

SEQ ID NO: 611 - RNA, 14 nt, Artificial Sequence
  Description of Artificial Sequence: Synthetic oligonucleotide
gaauccggauuauc

SEQ ID NO: 612 - RNA, 12 nt, Artificial Sequence
  Description of Artificial Sequence: Synthetic oligonucleotide
aaugugacauca

SEQ ID NO: 613 - RNA, 13 nt, Artificial Sequence
  Description of Artificial Sequence: Synthetic oligonucleotide
caucaaagcaagu

SEQ ID NO: 614 - RNA, 11 nt, Artificial Sequence
  Description of Artificial Sequence: Synthetic oligonucleotide
agagagagaaa

SEQ ID NO: 615 - RNA, 13 nt, Artificial Sequence
  Description of Artificial Sequence: Synthetic oligonucleotide
ucgcuguaguauu

SEQ ID NO: 616 - RNA, 14 nt, Artificial Sequence
  Description of Artificial Sequence: Synthetic oligonucleotide
cgcuguaguauuua

SEQ ID NO: 617 - RNA, 13 nt, Artificial Sequence
  Description of Artificial Sequence: Synthetic oligonucleotide
auuuaagcccaua

SEQ ID NO: 618 - RNA, 15 nt, Artificial Sequence
  Description of Artificial Sequence: Synthetic oligonucleotide
auuaaaauaaacaug

SEQ ID NO: 619 - RNA, 12 nt, Artificial Sequence
  Description of Artificial Sequence: Synthetic oligonucleotide
cuguucugaucg

SEQ ID NO: 620 - RNA, 16 nt, Artificial Sequence
  Description of Artificial Sequence: Synthetic oligonucleotide
aaauaauuugaacuuu

SEQ ID NO: 621 - RNA, 12 nt, Artificial Sequence
  Description of Artificial Sequence: Synthetic oligonucleotide
ugcgaccuuaau

SEQ ID NO: 622 - RNA, 11 nt, Artificial Sequence
  Description of Artificial Sequence: Synthetic oligonucleotide
cugagaaagcu

SEQ ID NO: 623 - RNA, 13 nt, Artificial Sequence
  Description of Artificial Sequence: Synthetic oligonucleotide
aguaaagaugcua

SEQ ID NO: 624 - RNA, 12 nt, Artificial Sequence
  Description of Artificial Sequence: Synthetic oligonucleotide
cugcuuaauugc

SEQ ID NO: 625 - RNA, 14 nt, Artificial Sequence
  Description of Artificial Sequence: Synthetic oligonucleotide
uaccauaugaauga

SEQ ID NO: 626 - RNA, 12 nt, Artificial Sequence
  Description of Artificial Sequence: Synthetic oligonucleotide
aacuuucuuauc

SEQ ID NO: 627 - RNA, 13 nt, Artificial Sequence
  Description of Artificial Sequence: Synthetic oligonucleotide
ccuugcaugacau

SEQ ID NO: 628 - RNA, 14 nt, Artificial Sequence
  Description of Artificial Sequence: Synthetic oligonucleotide
ugaauuuguauaug

SEQ ID NO: 629 - RNA, 12 nt, Artificial Sequence
  Description of Artificial Sequence: Synthetic oligonucleotide
gaauccuaguag

SEQ ID NO: 630 - RNA, 10 nt, Artificial Sequence
  Description of Artificial Sequence: Synthetic oligonucleotide
gaaagggaag

SEQ ID NO: 631 - RNA, 11 nt, Artificial Sequence
  Description of Artificial Sequence: Synthetic oligonucleotide
uaucggcaugc

SEQ ID NO: 632 - RNA, 12 nt, Artificial Sequence
  Description of Artificial Sequence: Synthetic oligonucleotide
caccucauagua

SEQ ID NO: 633 - RNA, 11 nt, Artificial Sequence
  Description of Artificial Sequence: Synthetic oligonucleotide
ccagaauugcc

SEQ ID NO: 634 - RNA, 11 nt, Artificial Sequence
  Description of Artificial Sequence: Synthetic oligonucleotide
uggugaucugg

SEQ ID NO: 635 - RNA, 12 nt, Artificial Sequence
  Description of Artificial Sequence: Synthetic oligonucleotide
gaucuggguaau

SEQ ID NO: 636 - RNA, 12 nt, Artificial Sequence
  Description of Artificial Sequence: Synthetic oligonucleotide
ggaugugaugaa

SEQ ID NO: 637 - RNA, 12 nt, Artificial Sequence
  Description of Artificial Sequence: Synthetic oligonucleotide
cauuuccacagc

SEQ ID NO: 638 - RNA, 11 nt, Artificial Sequence
  Description of Artificial Sequence: Synthetic oligonucleotide
acagcuacacc

SEQ ID NO: 639 - RNA, 12 nt, Artificial Sequence
  Description of Artificial Sequence: Synthetic oligonucleotide
ugcaguucuuac

SEQ ID NO: 640 - RNA, 12 nt, Artificial Sequence
  Description of Artificial Sequence: Synthetic oligonucleotide
acgagaagaaga

SEQ ID NO: 641 - RNA, 12 nt, Artificial Sequence
  Description of Artificial Sequence: Synthetic oligonucleotide
cgagaagaagau

SEQ ID NO: 642 - RNA, 15 nt, Artificial Sequence
  Description of Artificial Sequence: Synthetic oligonucleotide
aagaagaucauuuac

SEQ ID NO: 643 - RNA, 11 nt, Artificial Sequence
  Description of Artificial Sequence: Synthetic oligonucleotide
agaggaagagg

SEQ ID NO: 644 - RNA, 12 nt, Artificial Sequence
  Description of Artificial Sequence: Synthetic oligonucleotide
gaggaagaggug

SEQ ID NO: 645 - RNA, 13 nt, Artificial Sequence
  Description of Artificial Sequence: Synthetic oligonucleotide
cuacuuugagggc

SEQ ID NO: 646 - RNA, 12 nt, Artificial Sequence
  Description of Artificial Sequence: Synthetic oligonucleotide
agggcaucuccu

SEQ ID NO: 647 - RNA, 10 nt, Artificial Sequence
  Description of Artificial Sequence: Synthetic oligonucleotide
ggagugauau

SEQ ID NO: 648 - RNA, 11 nt, Artificial Sequence
  Description of Artificial Sequence: Synthetic oligonucleotide
gagugauaugg

SEQ ID NO: 649 - RNA, 12 nt, Artificial Sequence
  Description of Artificial Sequence: Synthetic oligonucleotide
ugcaguaaagau

SEQ ID NO: 650 - RNA, 13 nt, Artificial Sequence
  Description of Artificial Sequence: Synthetic oligonucleotide
aguaaagauccua

SEQ ID NO: 651 - RNA, 12 nt, Artificial Sequence
  Description of Artificial Sequence: Synthetic oligonucleotide
ugacaaaggaca

SEQ ID NO: 652 - RNA, 13 nt, Artificial Sequence
  Description of Artificial Sequence: Synthetic oligonucleotide
gcaauugugaccc

SEQ ID NO: 653 - RNA, 12 nt, Artificial Sequence
  Description of Artificial Sequence: Synthetic oligonucleotide
aacaucauccau

SEQ ID NO: 654 - RNA, 12 nt, Artificial Sequence
  Description of Artificial Sequence: Synthetic oligonucleotide
ugaaauccaaca

SEQ ID NO: 655 - RNA, 15 nt, Artificial Sequence
  Description of Artificial Sequence: Synthetic oligonucleotide
aacaauauauuucuc

SEQ ID NO: 656 - RNA, 14 nt, Artificial Sequence
  Description of Artificial Sequence: Synthetic oligonucleotide
aacaguaaagucac

SEQ ID NO: 657 - RNA, 14 nt, Artificial Sequence
  Description of Artificial Sequence: Synthetic oligonucleotide
ugugaagaaaguaa

SEQ ID NO: 658 - RNA, 13 nt, Artificial Sequence
  Description of Artificial Sequence: Synthetic oligonucleotide
cuuccgagccauc

SEQ ID NO: 659 - RNA, 12 nt, Artificial Sequence
  Description of Artificial Sequence: Synthetic oligonucleotide
aauggagguuga

SEQ ID NO: 660 - RNA, 12 nt, Artificial Sequence
  Description of Artificial Sequence: Synthetic oligonucleotide
ggagguugaaua

SEQ ID NO: 661 - RNA, 13 nt, Artificial Sequence
  Description of Artificial Sequence: Synthetic oligonucleotide
auuuugaguuuuc

SEQ ID NO: 662 - RNA, 12 nt, Artificial Sequence
  Description of Artificial Sequence: Synthetic oligonucleotide
uauccuguuugu

SEQ ID NO: 663 - RNA, 11 nt, Artificial Sequence
  Description of Artificial Sequence: Synthetic oligonucleotide
ccuguuuguuc

SEQ ID NO: 664 - RNA, 10 nt, Artificial Sequence
  Description of Artificial Sequence: Synthetic oligonucleotide
cucuacagcc

SEQ ID NO: 665 - RNA, 12 nt, Artificial Sequence
  Description of Artificial Sequence: Synthetic oligonucleotide
ucuuccauagcu

SEQ ID NO: 666 - RNA, 12 nt, Artificial Sequence
  Description of Artificial Sequence: Synthetic oligonucleotide
auaaucuuccug

SEQ ID NO: 667 - RNA, 12 nt, Artificial Sequence
  Description of Artificial Sequence: Synthetic oligonucleotide
uaaucuuccugu

SEQ ID NO: 668 - RNA, 12 nt, Artificial Sequence
  Description of Artificial Sequence: Synthetic oligonucleotide
cuucaugacuug

SEQ ID NO: 669 - RNA, 12 nt, Artificial Sequence
  Description of Artificial Sequence: Synthetic oligonucleotide
aagagggagaga

SEQ ID NO: 670 - RNA, 12 nt, Artificial Sequence
  Description of Artificial Sequence: Synthetic oligonucleotide
cgucuccuacca

SEQ ID NO: 671 - RNA, 12 nt, Artificial Sequence
  Description of Artificial Sequence: Synthetic oligonucleotide
gaucaaucggcc

SEQ ID NO: 672 - RNA, 12 nt, Artificial Sequence
  Description of Artificial Sequence: Synthetic oligonucleotide
ggacgaacaucc

SEQ ID NO: 673 - RNA, 11 nt, Artificial Sequence
  Description of Artificial Sequence: Synthetic oligonucleotide
agggucggaac

SEQ ID NO: 674 - RNA, 10 nt, Artificial Sequence
  Description of Artificial Sequence: Synthetic oligonucleotide
ucggaaccca

SEQ ID NO: 675 - RNA, 11 nt, Artificial Sequence
  Description of Artificial Sequence: Synthetic oligonucleotide
acccaagcuua

SEQ ID NO: 676 - RNA, 14 nt, Artificial Sequence
  Description of Artificial Sequence: Synthetic oligonucleotide
gaacuuuaagcaac

SEQ ID NO: 677 - RNA, 11 nt, Artificial Sequence
  Description of Artificial Sequence: Synthetic oligonucleotide
acuauucagug

SEQ ID NO: 678 - RNA, 11 nt, Artificial Sequence
  Description of Artificial Sequence: Synthetic oligonucleotide
cuauucagugg

SEQ ID NO: 679 - RNA, 13 nt, Artificial Sequence
  Description of Artificial Sequence: Synthetic oligonucleotide
aaacacagauaac

SEQ ID NO: 680 - RNA, 12 nt, Artificial Sequence
  Description of Artificial Sequence: Synthetic oligonucleotide
cuuaagaaaaga

SEQ ID NO: 681 - RNA, 12 nt, Artificial Sequence
  Description of Artificial Sequence: Synthetic oligonucleotide
cugaaggagugu

SEQ ID NO: 682 - RNA, 10 nt, Artificial Sequence
  Description of Artificial Sequence: Synthetic oligonucleotide
ucaccgcggg

SEQ ID NO: 683 - RNA, 14 nt, Artificial Sequence
  Description of Artificial Sequence: Synthetic oligonucleotide
agcagaaauaagcg

SEQ ID NO: 684 - RNA, 12 nt, Artificial Sequence
  Description of Artificial Sequence: Synthetic oligonucleotide
aagcgugccguu

SEQ ID NO: 685 - RNA, 12 nt, Artificial Sequence
  Description of Artificial Sequence: Synthetic oligonucleotide
agaaacagucac

SEQ ID NO: 686 - RNA, 12 nt, Artificial Sequence
  Description of Artificial Sequence: Synthetic oligonucleotide
agaggaagaagg

SEQ ID NO: 687 - RNA, 14 nt, Artificial Sequence
  Description of Artificial Sequence: Synthetic oligonucleotide
uguauucaaaauau

SEQ ID NO: 688 - RNA, 13 nt, Artificial Sequence
  Description of Artificial Sequence: Synthetic oligonucleotide
auuuuccucccuu

SEQ ID NO: 689 - RNA, 13 nt, Artificial Sequence
  Description of Artificial Sequence: Synthetic oligonucleotide
caaagaaagauag

SEQ ID NO: 690 - RNA, 12 nt, Artificial Sequence
  Description of Artificial Sequence: Synthetic oligonucleotide
aagaaagauaga

SEQ ID NO: 691 - RNA, 13 nt, Artificial Sequence
  Description of Artificial Sequence: Synthetic oligonucleotide
gaaagcauuuguu

SEQ ID NO: 692 - RNA, 13 nt, Artificial Sequence
  Description of Artificial Sequence: Synthetic oligonucleotide
ugaguuaaacgaa

SEQ ID NO: 693 - RNA, 12 nt, Artificial Sequence
  Description of Artificial Sequence: Synthetic oligonucleotide
acugauacagaa

SEQ ID NO: 694 - RNA, 12 nt, Artificial Sequence
  Description of Artificial Sequence: Synthetic oligonucleotide
auauuauauaua

SEQ ID NO: 695 - RNA, 12 nt, Artificial Sequence
  Description of Artificial Sequence: Synthetic oligonucleotide
auuauauauaua

SEQ ID NO: 696 - RNA, 12 nt, Artificial Sequence
  Description of Artificial Sequence: Synthetic oligonucleotide
ucacuggaugua

SEQ ID NO: 697 - RNA, 12 nt, Artificial Sequence
  Description of Artificial Sequence: Synthetic oligonucleotide
cagggaagagga

SEQ ID NO: 698 - RNA, 15 nt, Artificial Sequence
  Description of Artificial Sequence: Synthetic oligonucleotide
augaucuuuuuuuug

SEQ ID NO: 699 - RNA, 11 nt, Artificial Sequence
  Description of Artificial Sequence: Synthetic oligonucleotide
aguucacggcc

SEQ ID NO: 700 - RNA, 13 nt, Artificial Sequence
  Description of Artificial Sequence: Synthetic oligonucleotide
caccaucacacca

SEQ ID NO: 701 - RNA, 11 nt, Artificial Sequence
  Description of Artificial Sequence: Synthetic oligonucleotide
ccugcggguuu

SEQ ID NO: 702 - RNA, 10 nt, Artificial Sequence
  Description of Artificial Sequence: Synthetic oligonucleotide
auccaguuug

SEQ ID NO: 703 - RNA, 13 nt, Artificial Sequence
  Description of Artificial Sequence: Synthetic oligonucleotide
guuaaggacuucu

SEQ ID NO: 704 - RNA, 13 nt, Artificial Sequence
  Description of Artificial Sequence: Synthetic oligonucleotide
cagugggacagag

SEQ ID NO: 705 - RNA, 14 nt, Artificial Sequence
  Description of Artificial Sequence: Synthetic oligonucleotide
aauuuguuauugug

SEQ ID NO: 706 - RNA, 13 nt, Artificial Sequence
  Description of Artificial Sequence: Synthetic oligonucleotide
uucaaaugcauuu

SEQ ID NO: 707 - RNA, 10 nt, Artificial Sequence
  Description of Artificial Sequence: Synthetic oligonucleotide
caggaaagcc

SEQ ID NO: 708 - RNA, 11 nt, Artificial Sequence
  Description of Artificial Sequence: Synthetic oligonucleotide
aggaaagcccu

SEQ ID NO: 709 - RNA, 12 nt, Artificial Sequence
  Description of Artificial Sequence: Synthetic oligonucleotide
cccagcauggcc

SEQ ID NO: 710 - RNA, 11 nt, Artificial Sequence
  Description of Artificial Sequence: Synthetic oligonucleotide
cuucucccuga

SEQ ID NO: 711 - RNA, 12 nt, Artificial Sequence
  Description of Artificial Sequence: Synthetic oligonucleotide
gaagaagcccuu

SEQ ID NO: 712 - RNA, 12 nt, Artificial Sequence
  Description of Artificial Sequence: Synthetic oligonucleotide
agaagcccuuca

SEQ ID NO: 713 - RNA, 11 nt, Artificial Sequence
  Description of Artificial Sequence: Synthetic oligonucleotide
gcccuucagcg

SEQ ID NO: 714 - RNA, 11 nt, Artificial Sequence
  Description of Artificial Sequence: Synthetic oligonucleotide
ccuucagcggc

SEQ ID NO: 715 - RNA, 12 nt, Artificial Sequence
  Description of Artificial Sequence: Synthetic oligonucleotide
ucagcggccagu

SEQ ID NO: 716 - RNA, 12 nt, Artificial Sequence
  Description of Artificial Sequence: Synthetic oligonucleotide
ugaaaagcuccg

SEQ ID NO: 717 - RNA, 11 nt, Artificial Sequence
  Description of Artificial Sequence: Synthetic oligonucleotide
aaaagcuccgg

SEQ ID NO: 718 - RNA, 13 nt, Artificial Sequence
  Description of Artificial Sequence: Synthetic oligonucleotide
agucaacagucug

SEQ ID NO: 719 - RNA, 13 nt, Artificial Sequence
  Description of Artificial Sequence: Synthetic oligonucleotide
cagaguucaaaag

SEQ ID NO: 720 - RNA, 13 nt, Artificial Sequence
  Description of Artificial Sequence: Synthetic oligonucleotide
agaguucaaaagc

SEQ ID NO: 721 - RNA, 12 nt, Artificial Sequence
  Description of Artificial Sequence: Synthetic oligonucleotide
uucaaaagcccu

SEQ ID NO: 722 - RNA, 12 nt, Artificial Sequence
  Description of Artificial Sequence: Synthetic oligonucleotide
ucaaaagcccuu

SEQ ID NO: 723 - RNA, 12 nt, Artificial Sequence
  Description of Artificial Sequence: Synthetic oligonucleotide
aaaagcccuuca

SEQ ID NO: 724 - RNA, 12 nt, Artificial Sequence
  Description of Artificial Sequence: Synthetic oligonucleotide
aaagcccuucag

SEQ ID NO: 725 - RNA, 13 nt, Artificial Sequence
  Description of Artificial Sequence: Synthetic oligonucleotide
gugaagccgcucg

SEQ ID NO: 726 - RNA, 12 nt, Artificial Sequence
  Description of Artificial Sequence: Synthetic oligonucleotide
cacgccagucaa

SEQ ID NO: 727 - RNA, 13 nt, Artificial Sequence
  Description of Artificial Sequence: Synthetic oligonucleotide
uucuuggugcgug

SEQ ID NO: 728 - RNA, 14 nt, Artificial Sequence
  Description of Artificial Sequence: Synthetic oligonucleotide
auuggauucaucag

SEQ ID NO: 729 - RNA, 13 nt, Artificial Sequence
  Description of Artificial Sequence: Synthetic oligonucleotide
uggaauaccuaag

SEQ ID NO: 730 - RNA, 12 nt, Artificial Sequence
  Description of Artificial Sequence: Synthetic oligonucleotide
auuugaggcuca

SEQ ID NO: 731 - RNA, 11 nt, Artificial Sequence
  Description of Artificial Sequence: Synthetic oligonucleotide
ucuacaauugg

SEQ ID NO: 732 - RNA, 12 nt, Artificial Sequence
  Description of Artificial Sequence: Synthetic oligonucleotide
uaguuaggagcc

SEQ ID NO: 733 - RNA, 13 nt, Artificial Sequence
  Description of Artificial Sequence: Synthetic oligonucleotide
agucaauauccac

SEQ ID NO: 734 - RNA, 13 nt, Artificial Sequence
  Description of Artificial Sequence: Synthetic oligonucleotide
auguucagucaca

SEQ ID NO: 735 - RNA, 12 nt, Artificial Sequence
  Description of Artificial Sequence: Synthetic oligonucleotide
acacacacauac

SEQ ID NO: 736 - RNA, 12 nt, Artificial Sequence
  Description of Artificial Sequence: Synthetic oligonucleotide
uuccuuuugcuu

SEQ ID NO: 737 - RNA, 16 nt, Artificial Sequence
  Description of Artificial Sequence: Synthetic oligonucleotide
uuuuaaaguaauuuuu

SEQ ID NO: 738 - RNA, 13 nt, Artificial Sequence
  Description of Artificial Sequence: Synthetic oligonucleotide
caacagucaaugg

SEQ ID NO: 739 - RNA, 13 nt, Artificial Sequence
  Description of Artificial Sequence: Synthetic oligonucleotide
ucgacaaaccaau

SEQ ID NO: 740 - RNA, 12 nt, Artificial Sequence
  Description of Artificial Sequence: Synthetic oligonucleotide
acugcuaccacu

SEQ ID NO: 741 - RNA, 13 nt, Artificial Sequence
  Description of Artificial Sequence: Synthetic oligonucleotide
gcaagcggucuua

SEQ ID NO: 742 - RNA, 13 nt, Artificial Sequence
  Description of Artificial Sequence: Synthetic oligonucleotide
ggucuuaccggcu

SEQ ID NO: 743 - RNA, 11 nt, Artificial Sequence
  Description of Artificial Sequence: Synthetic oligonucleotide
gauggguuacc

SEQ ID NO: 744 - RNA, 11 nt, Artificial Sequence
  Description of Artificial Sequence: Synthetic oligonucleotide
guuaccugcga

SEQ ID NO: 745 - RNA, 12 nt, Artificial Sequence
  Description of Artificial Sequence: Synthetic oligonucleotide
aaucuugcugag

SEQ ID NO: 746 - RNA, 13 nt, Artificial Sequence
  Description of Artificial Sequence: Synthetic oligonucleotide
agcauaaaacagu

SEQ ID NO: 747 - RNA, 12 nt, Artificial Sequence
  Description of Artificial Sequence: Synthetic oligonucleotide
guccuuuauccu

SEQ ID NO: 748 - RNA, 12 nt, Artificial Sequence
  Description of Artificial Sequence: Synthetic oligonucleotide
caacgcaaguug

SEQ ID NO: 749 - RNA, 13 nt, Artificial Sequence
  Description of Artificial Sequence: Synthetic oligonucleotide
aaacugaaaccau

SEQ ID NO: 750 - RNA, 14 nt, Artificial Sequence
  Description of Artificial Sequence: Synthetic oligonucleotide
acuuuguuaaauau

SEQ ID NO: 751 - RNA, 14 nt, Artificial Sequence
  Description of Artificial Sequence: Synthetic oligonucleotide
guauauuaaaaguu

SEQ ID NO: 752 - RNA, 13 nt, Artificial Sequence
  Description of Artificial Sequence: Synthetic oligonucleotide
guuuugacuuaac

SEQ ID NO: 753 - RNA, 13 nt, Artificial Sequence
  Description of Artificial Sequence: Synthetic oligonucleotide
gcaaacucagcac

SEQ ID NO: 754 - RNA, 11 nt, Artificial Sequence
  Description of Artificial Sequence: Synthetic oligonucleotide
ugcugaccuca

SEQ ID NO: 755 - RNA, 14 nt, Artificial Sequence
  Description of Artificial Sequence: Synthetic oligonucleotide
uuuauucagaucgc

SEQ ID NO: 756 - RNA, 13 nt, Artificial Sequence
  Description of Artificial Sequence: Synthetic oligonucleotide
aggguucugggau

SEQ ID NO: 757 - RNA, 15 nt, Artificial Sequence
  Description of Artificial Sequence: Synthetic oligonucleotide
auauuggaaauuaug

SEQ ID NO: 758 - RNA, 13 nt, Artificial Sequence
  Description of Artificial Sequence: Synthetic oligonucleotide
auggaagcacuag

SEQ ID NO: 759 - RNA, 13 nt, Artificial Sequence
  Description of Artificial Sequence: Synthetic oligonucleotide
guuuuuaugugga

SEQ ID NO: 760 - RNA, 12 nt, Artificial Sequence
  Description of Artificial Sequence: Synthetic oligonucleotide
ggaauugguaga

SEQ ID NO: 761 - RNA, 13 nt, Artificial Sequence
  Description of Artificial Sequence: Synthetic oligonucleotide
uuagacuuggaga

SEQ ID NO: 762 - RNA, 13 nt, Artificial Sequence
  Description of Artificial Sequence: Synthetic oligonucleotide
uuacaguauucca

SEQ ID NO: 763 - RNA, 15 nt, Artificial Sequence
  Description of Artificial Sequence: Synthetic oligonucleotide
ccacugaugaauuaa

SEQ ID NO: 764 - RNA, 12 nt, Artificial Sequence
  Description of Artificial Sequence: Synthetic oligonucleotide
ccacaucaucac

SEQ ID NO: 765 - RNA, 13 nt, Artificial Sequence
  Description of Artificial Sequence: Synthetic oligonucleotide
cucaccaaacaga

SEQ ID NO: 766 - RNA, 12 nt, Artificial Sequence
  Description of Artificial Sequence: Synthetic oligonucleotide
ggaacaugaugg

SEQ ID NO: 767 - RNA, 12 nt, Artificial Sequence
  Description of Artificial Sequence: Synthetic oligonucleotide
cauguagacugc

SEQ ID NO: 768 - RNA, 13 nt, Artificial Sequence
  Description of Artificial Sequence: Synthetic oligonucleotide
ggaucuauuuaug

SEQ ID NO: 769 - RNA, 12 nt, Artificial Sequence
  Description of Artificial Sequence: Synthetic oligonucleotide
gcacuauuauca

SEQ ID NO: 770 - RNA, 11 nt, Artificial Sequence
  Description of Artificial Sequence: Synthetic oligonucleotide
aucaguucugc

SEQ ID NO: 771 - RNA, 13 nt, Artificial Sequence
  Description of Artificial Sequence: Synthetic oligonucleotide
agauuaaaccuac

SEQ ID NO: 772 - RNA, 13 nt, Artificial Sequence
  Description of Artificial Sequence: Synthetic oligonucleotide
auaaaauccuucu

SEQ ID NO: 773 - RNA, 12 nt, Artificial Sequence
  Description of Artificial Sequence: Synthetic oligonucleotide
aaugcuguagac

SEQ ID NO: 774 - RNA, 13 nt, Artificial Sequence
  Description of Artificial Sequence: Synthetic oligonucleotide
uugauaggaauag

SEQ ID NO: 775 - RNA, 11 nt, Artificial Sequence
  Description of Artificial Sequence: Synthetic oligonucleotide
aauggcccuga

SEQ ID NO: 776 - RNA, 11 nt, Artificial Sequence
  Description of Artificial Sequence: Synthetic oligonucleotide
uuccucaagca

SEQ ID NO: 777 - RNA, 10 nt, Artificial Sequence
  Description of Artificial Sequence: Synthetic oligonucleotide
guucagccca

SEQ ID NO: 778 - RNA, 11 nt, Artificial Sequence
  Description of Artificial Sequence: Synthetic oligonucleotide
gcugcugaacc

SEQ ID NO: 779 - RNA, 12 nt, Artificial Sequence
  Description of Artificial Sequence: Synthetic oligonucleotide
aaguucucuuca

SEQ ID NO: 780 - RNA, 11 nt, Artificial Sequence
  Description of Artificial Sequence: Synthetic oligonucleotide
ccagccuagag

SEQ ID NO: 781 - RNA, 13 nt, Artificial Sequence
  Description of Artificial Sequence: Synthetic oligonucleotide
cucugugaagugu

SEQ ID NO: 782 - RNA, 14 nt, Artificial Sequence
  Description of Artificial Sequence: Synthetic oligonucleotide
ugagaaaauuucaa

SEQ ID NO: 783 - RNA, 11 nt, Artificial Sequence
  Description of Artificial Sequence: Synthetic oligonucleotide
aauccuccuga

SEQ ID NO: 784 - RNA, 12 nt, Artificial Sequence
  Description of Artificial Sequence: Synthetic oligonucleotide
gugacaucauau

SEQ ID NO: 785 - RNA, 13 nt, Artificial Sequence
  Description of Artificial Sequence: Synthetic oligonucleotide
aaucuucaucaua

SEQ ID NO: 786 - RNA, 13 nt, Artificial Sequence
  Description of Artificial Sequence: Synthetic oligonucleotide
gacuagcuauuaa

SEQ ID NO: 787 - RNA, 14 nt, Artificial Sequence
  Description of Artificial Sequence: Synthetic oligonucleotide
ucucuacuaaaaau

SEQ ID NO: 788 - RNA, 12 nt, Artificial Sequence
  Description of Artificial Sequence: Synthetic oligonucleotide
ucuaucucgccu

SEQ ID NO: 789 - RNA, 13 nt, Artificial Sequence
  Description of Artificial Sequence: Synthetic oligonucleotide
cuucgguccaguu

SEQ ID NO: 790 - RNA, 11 nt, Artificial Sequence
  Description of Artificial Sequence: Synthetic oligonucleotide
gauguagccgc

SEQ ID NO: 791 - RNA, 12 nt, Artificial Sequence
  Description of Artificial Sequence: Synthetic oligonucleotide
ugaggagacuug

SEQ ID NO: 792 - RNA, 12 nt, Artificial Sequence
  Description of Artificial Sequence: Synthetic oligonucleotide
gaguagugagga

SEQ ID NO: 793 - RNA, 14 nt, Artificial Sequence
  Description of Artificial Sequence: Synthetic oligonucleotide
cagaugaguacaaa

SEQ ID NO: 794 - RNA, 13 nt, Artificial Sequence
  Description of Artificial Sequence: Synthetic oligonucleotide
guuguuaaugggc

SEQ ID NO: 795 - RNA, 13 nt, Artificial Sequence
  Description of Artificial Sequence: Synthetic oligonucleotide
uuuuuaauuuauu

SEQ ID NO: 796 - RNA, 12 nt, Artificial Sequence
  Description of Artificial Sequence: Synthetic oligonucleotide
uauuuaaauaug

SEQ ID NO: 797 - RNA, 13 nt, Artificial Sequence
  Description of Artificial Sequence: Synthetic oligonucleotide
uauccuuuguuuc

SEQ ID NO: 798 - RNA, 14 nt, Artificial Sequence
  Description of Artificial Sequence: Synthetic oligonucleotide
cgucuaaguguuug

SEQ ID NO: 799 - RNA, 12 nt, Artificial Sequence
  Description of Artificial Sequence: Synthetic oligonucleotide
accugugacaaa

SEQ ID NO: 800 - RNA, 13 nt, Artificial Sequence
  Description of Artificial Sequence: Synthetic oligonucleotide
ccaggcugaauua

SEQ ID NO: 801 - RNA, 14 nt, Artificial Sequence
  Description of Artificial Sequence: Synthetic oligonucleotide
gucauucuuacaau

SEQ ID NO: 802 - RNA, 15 nt, Artificial Sequence
  Description of Artificial Sequence: Synthetic oligonucleotide
ucauucuuacaauug

SEQ ID NO: 803 - RNA, 12 nt, Artificial Sequence
  Description of Artificial Sequence: Synthetic oligonucleotide
cagagaguguac

SEQ ID NO: 804 - RNA, 12 nt, Artificial Sequence
  Description of Artificial Sequence: Synthetic oligonucleotide
agaacucagcag

SEQ ID NO: 805 - RNA, 13 nt, Artificial Sequence
  Description of Artificial Sequence: Synthetic oligonucleotide
uuuauuuucagua

SEQ ID NO: 806 - RNA, 12 nt, Artificial Sequence
  Description of Artificial Sequence: Synthetic oligonucleotide
ucuuaaauggaa

SEQ ID NO: 807 - RNA, 13 nt, Artificial Sequence
  Description of Artificial Sequence: Synthetic oligonucleotide
ugccuaaaauugu

SEQ ID NO: 808 - RNA, 12 nt, Artificial Sequence
  Description of Artificial Sequence: Synthetic oligonucleotide
agacugugagcu

SEQ ID NO: 809 - RNA, 14 nt, Artificial Sequence
  Description of Artificial Sequence: Synthetic oligonucleotide
ugcuuuuuauuaau

SEQ ID NO: 810 - RNA, 13 nt, Artificial Sequence
  Description of Artificial Sequence: Synthetic oligonucleotide
cucuucuuacauu

SEQ ID NO: 811 - RNA, 15 nt, Artificial Sequence
  Description of Artificial Sequence: Synthetic oligonucleotide
cauuuguaaaaaugu

SEQ ID NO: 812 - RNA, 15 nt, Artificial Sequence
  Description of Artificial Sequence: Synthetic oligonucleotide
aucuuaauucauauu

SEQ ID NO: 813 - RNA, 13 nt, Artificial Sequence
  Description of Artificial Sequence: Synthetic oligonucleotide
gaacuaaucauga

SEQ ID NO: 814 - RNA, 12 nt, Artificial Sequence
  Description of Artificial Sequence: Synthetic oligonucleotide
ucugcucuuggg

SEQ ID NO: 815 - RNA, 13 nt, Artificial Sequence
  Description of Artificial Sequence: Synthetic oligonucleotide
caguagcuuugag

SEQ ID NO: 816 - RNA, 14 nt, Artificial Sequence
  Description of Artificial Sequence: Synthetic oligonucleotide
cacguaauauuuca

SEQ ID NO: 817 - RNA, 13 nt, Artificial Sequence
  Description of Artificial Sequence: Synthetic oligonucleotide
uauucucuucacu

SEQ ID NO: 818 - RNA, 14 nt, Artificial Sequence
  Description of Artificial Sequence: Synthetic oligonucleotide
cuaaugcuaagaaa

SEQ ID NO: 819 - RNA, 12 nt, Artificial Sequence
  Description of Artificial Sequence: Synthetic oligonucleotide
gcugaaaaucaa

SEQ ID NO: 820 - RNA, 14 nt, Artificial Sequence
  Description of Artificial Sequence: Synthetic oligonucleotide
aauaugauuacuuu

SEQ ID NO: 821 - RNA, 14 nt, Artificial Sequence
  Description of Artificial Sequence: Synthetic oligonucleotide
cauuuuguucuaca

SEQ ID NO: 822 - RNA, 12 nt, Artificial Sequence
  Description of Artificial Sequence: Synthetic oligonucleotide
cccgggacucuc

SEQ ID NO: 823 - RNA, 14 nt, Artificial Sequence
  Description of Artificial Sequence: Synthetic oligonucleotide
ccuuuaaaguaaag

SEQ ID NO: 824 - RNA, 13 nt, Artificial Sequence
  Description of Artificial Sequence: Synthetic oligonucleotide
ucuggaagccugg

SEQ ID NO: 825 - RNA, 14 nt, Artificial Sequence
  Description of Artificial Sequence: Synthetic oligonucleotide
aaaacaaaagagag

SEQ ID NO: 826 - RNA, 13 nt, Artificial Sequence
  Description of Artificial Sequence: Synthetic oligonucleotide
aucaguuaugccg

SEQ ID NO: 827 - RNA, 13 nt, Artificial Sequence
  Description of Artificial Sequence: Synthetic oligonucleotide
uaaaagaagucca

SEQ ID NO: 828 - RNA, 11 nt, Artificial Sequence
  Description of Artificial Sequence: Synthetic oligonucleotide
aggugagguua

SEQ ID NO: 829 - RNA, 11 nt, Artificial Sequence
  Description of Artificial Sequence: Synthetic oligonucleotide
gggaagaggac

SEQ ID NO: 830 - RNA, 13 nt, Artificial Sequence
  Description of Artificial Sequence: Synthetic oligonucleotide
aagcaaguauugu

SEQ ID NO: 831 - RNA, 12 nt, Artificial Sequence
  Description of Artificial Sequence: Synthetic oligonucleotide
auuguagcacuc

SEQ ID NO: 832 - RNA, 14 nt, Artificial Sequence
  Description of Artificial Sequence: Synthetic oligonucleotide
acaaaaccacaaau

SEQ ID NO: 833 - RNA, 12 nt, Artificial Sequence
  Description of Artificial Sequence: Synthetic oligonucleotide
uaagcccauaca

SEQ ID NO: 834 - RNA, 11 nt, Artificial Sequence
  Description of Artificial Sequence: Synthetic oligonucleotide
agcccauacag

SEQ ID NO: 835 - RNA, 12 nt, Artificial Sequence
  Description of Artificial Sequence: Synthetic oligonucleotide
cagaaaccuucc

SEQ ID NO: 836 - RNA, 10 nt, Artificial Sequence
  Description of Artificial Sequence: Synthetic oligonucleotide
guauaccuac

SEQ ID NO: 837 - RNA, 13 nt, Artificial Sequence
  Description of Artificial Sequence: Synthetic oligonucleotide
gccaguuuucgga

SEQ ID NO: 838 - RNA, 9 nt, Artificial Sequence
  Description of Artificial Sequence: Synthetic oligonucleotide
ggaacaggg

SEQ ID NO: 839 - RNA, 13 nt, Artificial Sequence
  Description of Artificial Sequence: Synthetic oligonucleotide
uuaacuuuccagu

SEQ ID NO: 840 - RNA, 14 nt, Artificial Sequence
  Description of Artificial Sequence: Synthetic oligonucleotide
aaaguuugguuuug

SEQ ID NO: 841 - RNA, 12 nt, Artificial Sequence
  Description of Artificial Sequence: Synthetic oligonucleotide
cuucccacugua

SEQ ID NO: 842 - RNA, 13 nt, Artificial Sequence
  Description of Artificial Sequence: Synthetic oligonucleotide
ugauaccauauga

SEQ ID NO: 843 - RNA, 11 nt, Artificial Sequence
  Description of Artificial Sequence: Synthetic oligonucleotide
aacaugggcug

SEQ ID NO: 844 - RNA, 13 nt, Artificial Sequence
  Description of Artificial Sequence: Synthetic oligonucleotide
caacuuuuucaua

SEQ ID NO: 845 - RNA, 12 nt, Artificial Sequence
  Description of Artificial Sequence: Synthetic oligonucleotide
caugaggccgga

SEQ ID NO: 846 - RNA, 11 nt, Artificial Sequence
  Description of Artificial Sequence: Synthetic oligonucleotide
acugcauuugu

SEQ ID NO: 847 - RNA, 13 nt, Artificial Sequence
  Description of Artificial Sequence: Synthetic oligonucleotide
aauguuuacuacc

SEQ ID NO: 848 - RNA, 15 nt, Artificial Sequence
  Description of Artificial Sequence: Synthetic oligonucleotide
aauuuuuugaugaaa

SEQ ID NO: 849 - RNA, 14 nt, Artificial Sequence
  Description of Artificial Sequence: Synthetic oligonucleotide
cagugugugaauuu

SEQ ID NO: 850 - RNA, 13 nt, Artificial Sequence
  Description of Artificial Sequence: Synthetic oligonucleotide
gagcaauguaugu

SEQ ID NO: 851 - RNA, 14 nt, Artificial Sequence
  Description of Artificial Sequence: Synthetic oligonucleotide
aaagcacauauaua

SEQ ID NO: 852 - RNA, 14 nt, Artificial Sequence
  Description of Artificial Sequence: Synthetic oligonucleotide
guaauaguuucucc

SEQ ID NO: 853 - RNA, 13 nt, Artificial Sequence
  Description of Artificial Sequence: Synthetic oligonucleotide
aguuucuccaaau

SEQ ID NO: 854 - RNA, 13 nt, Artificial Sequence
  Description of Artificial Sequence: Synthetic oligonucleotide
uacuuccuagaaa

SEQ ID NO: 855 - RNA, 13 nt, Artificial Sequence
  Description of Artificial Sequence: Synthetic oligonucleotide
uacaccauauaug

SEQ ID NO: 856 - RNA, 14 nt, Artificial Sequence
  Description of Artificial Sequence: Synthetic oligonucleotide
auauaugaauggag

SEQ ID NO: 857 - RNA, 13 nt, Artificial Sequence
  Description of Artificial Sequence: Synthetic oligonucleotide
acgagaagaagau

SEQ ID NO: 858 - RNA, 13 nt, Artificial Sequence
  Description of Artificial Sequence: Synthetic oligonucleotide
ucauuuacaggga

SEQ ID NO: 859 - RNA, 13 nt, Artificial Sequence
  Description of Artificial Sequence: Synthetic oligonucleotide
cauuuacagggac

SEQ ID NO: 860 - RNA, 10 nt, Artificial Sequence
  Description of Artificial Sequence: Synthetic oligonucleotide
agggaccuga

SEQ ID NO: 861 - RNA, 14 nt, Artificial Sequence
  Description of Artificial Sequence: Synthetic oligonucleotide
uguuugacugcauc

SEQ ID NO: 862 - RNA, 13 nt, Artificial Sequence
  Description of Artificial Sequence: Synthetic oligonucleotide
uuugacugcaucg

SEQ ID NO: 863 - RNA, 12 nt, Artificial Sequence
  Description of Artificial Sequence: Synthetic oligonucleotide
gaguucacaggg

SEQ ID NO: 864 - RNA, 13 nt, Artificial Sequence
  Description of Artificial Sequence: Synthetic oligonucleotide
ggcaccucugucc

SEQ ID NO: 865 - RNA, 15 nt, Artificial Sequence
  Description of Artificial Sequence: Synthetic oligonucleotide
gguuugucuuuuuaa

SEQ ID NO: 866 - RNA, 14 nt, Artificial Sequence
  Description of Artificial Sequence: Synthetic oligonucleotide
uuugucuuuuuaag

SEQ ID NO: 867 - RNA, 13 nt, Artificial Sequence
  Description of Artificial Sequence: Synthetic oligonucleotide
ccuaaagguuguc

SEQ ID NO: 868 - RNA, 12 nt, Artificial Sequence
  Description of Artificial Sequence: Synthetic oligonucleotide
aagguugucgac

SEQ ID NO: 869 - RNA, 13 nt, Artificial Sequence
  Description of Artificial Sequence: Synthetic oligonucleotide
accuggcaauugu

SEQ ID NO: 870 - RNA, 12 nt, Artificial Sequence
  Description of Artificial Sequence: Synthetic oligonucleotide
aguggugcgagg

SEQ ID NO: 871 - RNA, 13 nt, Artificial Sequence
  Description of Artificial Sequence: Synthetic oligonucleotide
agagacaugaaau

SEQ ID NO: 872 - RNA, 13 nt, Artificial Sequence
  Description of Artificial Sequence: Synthetic oligonucleotide
auauauuucucca

SEQ ID NO: 873 - RNA, 10 nt, Artificial Sequence
  Description of Artificial Sequence: Synthetic oligonucleotide
caugaaggcu

SEQ ID NO: 874 - RNA, 11 nt, Artificial Sequence
  Description of Artificial Sequence: Synthetic oligonucleotide
gcuggaguggu

SEQ ID NO: 875 - RNA, 11 nt, Artificial Sequence
  Description of Artificial Sequence: Synthetic oligonucleotide
aggaagagagg

SEQ ID NO: 876 - RNA, 12 nt, Artificial Sequence
  Description of Artificial Sequence: Synthetic oligonucleotide
cuugcaucgggc

SEQ ID NO: 877 - RNA, 13 nt, Artificial Sequence
  Description of Artificial Sequence: Synthetic oligonucleotide
auauccuacugug

SEQ ID NO: 878 - RNA, 13 nt, Artificial Sequence
  Description of Artificial Sequence: Synthetic oligonucleotide
uccuacuguguaa

SEQ ID NO: 879 - RNA, 12 nt, Artificial Sequence
  Description of Artificial Sequence: Synthetic oligonucleotide
ccuuguagugua

SEQ ID NO: 880 - RNA, 13 nt, Artificial Sequence
  Description of Artificial Sequence: Synthetic oligonucleotide
ucuuuguugauug

SEQ ID NO: 881 - RNA, 14 nt, Artificial Sequence
  Description of Artificial Sequence: Synthetic oligonucleotide
uuuguugauugaaa

SEQ ID NO: 882 - RNA, 15 nt, Artificial Sequence
  Description of Artificial Sequence: Synthetic oligonucleotide
uucuuuuucuuccau

SEQ ID NO: 883 - RNA, 13 nt, Artificial Sequence
  Description of Artificial Sequence: Synthetic oligonucleotide
aaucuuccuucua

SEQ ID NO: 884 - RNA, 13 nt, Artificial Sequence
  Description of Artificial Sequence: Synthetic oligonucleotide
uugaaugcuucau

SEQ ID NO: 885 - RNA, 13 nt, Artificial Sequence
  Description of Artificial Sequence: Synthetic oligonucleotide
ugaaugcuucaug

SEQ ID NO: 886 - RNA, 13 nt, Artificial Sequence
  Description of Artificial Sequence: Synthetic oligonucleotide
aauucuacuuuga

SEQ ID NO: 887 - RNA, 13 nt, Artificial Sequence
  Description of Artificial Sequence: Synthetic oligonucleotide
agcaacuacagac

SEQ ID NO: 888 - RNA, 13 nt, Artificial Sequence
  Description of Artificial Sequence: Synthetic oligonucleotide
gaccaaggucaac

SEQ ID NO: 889 - RNA, 13 nt, Artificial Sequence
  Description of Artificial Sequence: Synthetic oligonucleotide
cgacuaucucgac

SEQ ID NO: 890 - RNA, 13 nt, Artificial Sequence
  Description of Artificial Sequence: Synthetic oligonucleotide
aaccuucccaaac

SEQ ID NO: 891 - RNA, 14 nt, Artificial Sequence
  Description of Artificial Sequence: Synthetic oligonucleotide
ccaagcuuagaacu

SEQ ID NO: 892 - RNA, 15 nt, Artificial Sequence
  Description of Artificial Sequence: Synthetic oligonucleotide
agcuuagaacuuuaa

SEQ ID NO: 893 - RNA, 11 nt, Artificial Sequence
  Description of Artificial Sequence: Synthetic oligonucleotide
aagaccaccac

SEQ ID NO: 894 - RNA, 14 nt, Artificial Sequence
  Description of Artificial Sequence: Synthetic oligonucleotide
gcgagaaauaaagu

SEQ ID NO: 895 - RNA, 14 nt, Artificial Sequence
  Description of Artificial Sequence: Synthetic oligonucleotide
cgagaaauaaaguu

SEQ ID NO: 896 - RNA, 12 nt, Artificial Sequence
  Description of Artificial Sequence: Synthetic oligonucleotide
aggaaaugaucc

SEQ ID NO: 897 - RNA, 13 nt, Artificial Sequence
  Description of Artificial Sequence: Synthetic oligonucleotide
gaagaaaugaaac

SEQ ID NO: 898 - RNA, 13 nt, Artificial Sequence
  Description of Artificial Sequence: Synthetic oligonucleotide
guuuccauccucc

SEQ ID NO: 899 - RNA, 15 nt, Artificial Sequence
  Description of Artificial Sequence: Synthetic oligonucleotide
acugaaaaucuuuga

SEQ ID NO: 900 - RNA, 11 nt, Artificial Sequence
  Description of Artificial Sequence: Synthetic oligonucleotide
ugccguucagg

SEQ ID NO: 901 - RNA, 13 nt, Artificial Sequence
  Description of Artificial Sequence: Synthetic oligonucleotide
caggguccagaag

SEQ ID NO: 902 - RNA, 13 nt, Artificial Sequence
  Description of Artificial Sequence: Synthetic oligonucleotide
ucaagacugcuug

SEQ ID NO: 903 - RNA, 13 nt, Artificial Sequence
  Description of Artificial Sequence: Synthetic oligonucleotide
uccaugucuuugg

SEQ ID NO: 904 - RNA, 11 nt, Artificial Sequence
  Description of Artificial Sequence: Synthetic oligonucleotide
gccugaaacac

SEQ ID NO: 905 - RNA, 12 nt, Artificial Sequence
  Description of Artificial Sequence: Synthetic oligonucleotide
ucucuguaccuc

SEQ ID NO: 906 - RNA, 12 nt, Artificial Sequence
  Description of Artificial Sequence: Synthetic oligonucleotide
agcaagacaaga

SEQ ID NO: 907 - RNA, 13 nt, Artificial Sequence
  Description of Artificial Sequence: Synthetic oligonucleotide
gcaagacaagaaa

SEQ ID NO: 908 - RNA, 12 nt, Artificial Sequence
  Description of Artificial Sequence: Synthetic oligonucleotide
uguacaagaucc

SEQ ID NO: 909 - RNA, 12 nt, Artificial Sequence
  Description of Artificial Sequence: Synthetic oligonucleotide
cguacuugcaga

SEQ ID NO: 910 - RNA, 13 nt, Artificial Sequence
  Description of Artificial Sequence: Synthetic oligonucleotide
cgaucgauacaga

SEQ ID NO: 911 - RNA, 13 nt, Artificial Sequence
  Description of Artificial Sequence: Synthetic oligonucleotide
uauaaaaauaaau

SEQ ID NO: 912 - RNA, 13 nt, Artificial Sequence
  Description of Artificial Sequence: Synthetic oligonucleotide
uaaaaauaaauau

SEQ ID NO: 913 - RNA, 13 nt, Artificial Sequence
  Description of Artificial Sequence: Synthetic oligonucleotide
uuugacugcugug

SEQ ID NO: 914 - RNA, 13 nt, Artificial Sequence
  Description of Artificial Sequence: Synthetic oligonucleotide
ggagaugagagac

SEQ ID NO: 915 - RNA, 10 nt, Artificial Sequence
  Description of Artificial Sequence: Synthetic oligonucleotide
ucccacuugg

SEQ ID NO: 916 - RNA, 10 nt, Artificial Sequence
  Description of Artificial Sequence: Synthetic oligonucleotide
guucacggcc

SEQ ID NO: 917 - RNA, 12 nt, Artificial Sequence
  Description of Artificial Sequence: Synthetic oligonucleotide
accaucacacca

SEQ ID NO: 918 - RNA, 10 nt, Artificial Sequence
  Description of Artificial Sequence: Synthetic oligonucleotide
cugcggguuu

SEQ ID NO: 919 - RNA, 9 nt, Artificial Sequence
  Description of Artificial Sequence: Synthetic oligonucleotide
uccaguuug

SEQ ID NO: 920 - RNA, 12 nt, Artificial Sequence
  Description of Artificial Sequence: Synthetic oligonucleotide
uuaaggacuucu

SEQ ID NO: 921 - RNA, 12 nt, Artificial Sequence
  Description of Artificial Sequence: Synthetic oligonucleotide
agugggacagag

SEQ ID NO: 922 - RNA, 13 nt, Artificial Sequence
  Description of Artificial Sequence: Synthetic oligonucleotide
auuuguuauugug

SEQ ID NO: 923 - RNA, 12 nt, Artificial Sequence
  Description of Artificial Sequence: Synthetic oligonucleotide
ucaaaugcauuu

SEQ ID NO: 924 - RNA, 9 nt, Artificial Sequence
  Description of Artificial Sequence: Synthetic oligonucleotide
aggaaagcc

SEQ ID NO: 925 - RNA, 10 nt, Artificial Sequence
  Description of Artificial Sequence: Synthetic oligonucleotide
ggaaagcccu

SEQ ID NO: 926 - RNA, 11 nt, Artificial Sequence
  Description of Artificial Sequence: Synthetic oligonucleotide
ccagcauggcc

SEQ ID NO: 927 - RNA, 10 nt, Artificial Sequence
  Description of Artificial Sequence: Synthetic oligonucleotide
uucucccuga

SEQ ID NO: 928 - RNA, 11 nt, Artificial Sequence
  Description of Artificial Sequence: Synthetic oligonucleotide
aagaagcccuu

SEQ ID NO: 929 - RNA, 11 nt, Artificial Sequence
  Description of Artificial Sequence: Synthetic oligonucleotide
gaagcccuuca

SEQ ID NO: 930 - RNA, 10 nt, Artificial Sequence
  Description of Artificial Sequence: Synthetic oligonucleotide
cccuucagcg

SEQ ID NO: 931 - RNA, 10 nt, Artificial Sequence
  Description of Artificial Sequence: Synthetic oligonucleotide
cuucagcggc

SEQ ID NO: 932 - RNA, 11 nt, Artificial Sequence
  Description of Artificial Sequence: Synthetic oligonucleotide
cagcggccagu

SEQ ID NO: 933 - RNA, 11 nt, Artificial Sequence
  Description of Artificial Sequence: Synthetic oligonucleotide
gaaaagcuccg

SEQ ID NO: 934 - RNA, 10 nt, Artificial Sequence
  Description of Artificial Sequence: Synthetic oligonucleotide
aaagcuccgg

SEQ ID NO: 935 - RNA, 12 nt, Artificial Sequence
  Description of Artificial Sequence: Synthetic oligonucleotide
gucaacagucug

SEQ ID NO: 936 - RNA, 12 nt, Artificial Sequence
  Description of Artificial Sequence: Synthetic oligonucleotide
agaguucaaaag

SEQ ID NO: 937 - RNA, 12 nt, Artificial Sequence
  Description of Artificial Sequence: Synthetic oligonucleotide
gaguucaaaagc

SEQ ID NO: 938 - RNA, 11 nt, Artificial Sequence
  Description of Artificial Sequence: Synthetic oligonucleotide
ucaaaagcccu

SEQ ID NO: 939 - RNA, 11 nt, Artificial Sequence
  Description of Artificial Sequence: Synthetic oligonucleotide
caaaagcccuu

SEQ ID NO: 940 - RNA, 11 nt, Artificial Sequence
  Description of Artificial Sequence: Synthetic oligonucleotide
aaagcccuuca

SEQ ID NO: 941 - RNA, 11 nt, Artificial Sequence
  Description of Artificial Sequence: Synthetic oligonucleotide
aagcccuucag

SEQ ID NO: 942 - RNA, 12 nt, Artificial Sequence
  Description of Artificial Sequence: Synthetic oligonucleotide
ugaagccgcucg

SEQ ID NO: 943 - RNA, 11 nt, Artificial Sequence
  Description of Artificial Sequence: Synthetic oligonucleotide
acgccagucaa

SEQ ID NO: 944 - RNA, 12 nt, Artificial Sequence
  Description of Artificial Sequence: Synthetic oligonucleotide
ucuuggugcgug

SEQ ID NO: 945 - RNA, 13 nt, Artificial Sequence
  Description of Artificial Sequence: Synthetic oligonucleotide
uuggauucaucag

SEQ ID NO: 946 - RNA, 12 nt, Artificial Sequence
  Description of Artificial Sequence: Synthetic oligonucleotide
ggaauaccuaag

SEQ ID NO: 947 - RNA, 11 nt, Artificial Sequence
  Description of Artificial Sequence: Synthetic oligonucleotide
uuugaggcuca

SEQ ID NO: 948 - RNA, 10 nt, Artificial Sequence
  Description of Artificial Sequence: Synthetic oligonucleotide
cuacaauugg

SEQ ID NO: 949 - RNA, 11 nt, Artificial Sequence
  Description of Artificial Sequence: Synthetic oligonucleotide
aguuaggagcc

SEQ ID NO: 950 - RNA, 12 nt, Artificial Sequence
  Description of Artificial Sequence: Synthetic oligonucleotide
gucaauauccac

SEQ ID NO: 951 - RNA, 12 nt, Artificial Sequence
  Description of Artificial Sequence: Synthetic oligonucleotide
uguucagucaca

SEQ ID NO: 952 - RNA, 11 nt, Artificial Sequence
  Description of Artificial Sequence: Synthetic oligonucleotide
cacacacauac

SEQ ID NO: 953 - RNA, 11 nt, Artificial Sequence
  Description of Artificial Sequence: Synthetic oligonucleotide
uccuuuugcuu

SEQ ID NO: 954 - RNA, 15 nt, Artificial Sequence
  Description of Artificial Sequence: Synthetic oligonucleotide
uuuaaaguaauuuuu

SEQ ID NO: 955 - RNA, 12 nt, Artificial Sequence
  Description of Artificial Sequence: Synthetic oligonucleotide
aacagucaaugg

SEQ ID NO: 956 - RNA, 12 nt, Artificial Sequence
  Description of Artificial Sequence: Synthetic oligonucleotide
cgacaaaccaau

SEQ ID NO: 957 - RNA, 11 nt, Artificial Sequence
  Description of Artificial Sequence: Synthetic oligonucleotide
cugcuaccacu

SEQ ID NO: 958 - RNA, 12 nt, Artificial Sequence
  Description of Artificial Sequence: Synthetic oligonucleotide
caagcggucuua

SEQ ID NO: 959 - RNA, 12 nt, Artificial Sequence
  Description of Artificial Sequence: Synthetic oligonucleotide
gucuuaccggcu

SEQ ID NO: 960 - RNA, 10 nt, Artificial Sequence
  Description of Artificial Sequence: Synthetic oligonucleotide
auggguuacc

SEQ ID NO: 961 - RNA, 10 nt, Artificial Sequence
  Description of Artificial Sequence: Synthetic oligonucleotide
uuaccugcga

SEQ ID NO: 962 - RNA, 11 nt, Artificial Sequence
  Description of Artificial Sequence: Synthetic oligonucleotide
aucuugcugag

SEQ ID NO: 963 - RNA, 12 nt, Artificial Sequence
  Description of Artificial Sequence: Synthetic oligonucleotide
gcauaaaacagu

SEQ ID NO: 964 - RNA, 11 nt, Artificial Sequence
  Description of Artificial Sequence: Synthetic oligonucleotide
uccuuuauccu

SEQ ID NO: 965 - RNA, 11 nt, Artificial Sequence
  Description of Artificial Sequence: Synthetic oligonucleotide
aacgcaaguug

SEQ ID NO: 966 - RNA, 12 nt, Artificial Sequence
  Description of Artificial Sequence: Synthetic oligonucleotide
aacugaaaccau

SEQ ID NO: 967 - RNA, 13 nt, Artificial Sequence
  Description of Artificial Sequence: Synthetic oligonucleotide
cuuuguuaaauau

SEQ ID NO: 968 - RNA, 13 nt, Artificial Sequence
  Description of Artificial Sequence: Synthetic oligonucleotide
uauauuaaaaguu

SEQ ID NO: 969 - RNA, 12 nt, Artificial Sequence
  Description of Artificial Sequence: Synthetic oligonucleotide
uuuugacuuaac

SEQ ID NO: 970 - RNA, 12 nt, Artificial Sequence
  Description of Artificial Sequence: Synthetic oligonucleotide
caaacucagcac

SEQ ID NO: 971 - RNA, 10 nt, Artificial Sequence
  Description of Artificial Sequence: Synthetic oligonucleotide
gcugaccuca

SEQ ID NO: 972 - RNA, 13 nt, Artificial Sequence
  Description of Artificial Sequence: Synthetic oligonucleotide
uuauucagaucgc

SEQ ID NO: 973 - RNA, 12 nt, Artificial Sequence
  Description of Artificial Sequence: Synthetic oligonucleotide
ggguucugggau

SEQ ID NO: 974 - RNA, 14 nt, Artificial Sequence
  Description of Artificial Sequence: Synthetic oligonucleotide
uauuggaaauuaug

SEQ ID NO: 975 - RNA, 12 nt, Artificial Sequence
  Description of Artificial Sequence: Synthetic oligonucleotide
uggaagcacuag

SEQ ID NO: 976 - RNA, 12 nt, Artificial Sequence
  Description of Artificial Sequence: Synthetic oligonucleotide
uuuuuaugugga

SEQ ID NO: 977 - RNA, 11 nt, Artificial Sequence
  Description of Artificial Sequence: Synthetic oligonucleotide
gaauugguaga

SEQ ID NO: 978 - RNA, 12 nt, Artificial Sequence
  Description of Artificial Sequence: Synthetic oligonucleotide
uagacuuggaga

SEQ ID NO: 979 - RNA, 12 nt, Artificial Sequence
  Description of Artificial Sequence: Synthetic oligonucleotide
uacaguauucca

SEQ ID NO: 980 - RNA, 14 nt, Artificial Sequence
  Description of Artificial Sequence: Synthetic oligonucleotide
cacugaugaauuaa

SEQ ID NO: 981 - RNA, 11 nt, Artificial Sequence
  Description of Artificial Sequence: Synthetic oligonucleotide
cacaucaucac

SEQ ID NO: 982 - RNA, 12 nt, Artificial Sequence
  Description of Artificial Sequence: Synthetic oligonucleotide
ucaccaaacaga

SEQ ID NO: 983 - RNA, 11 nt, Artificial Sequence
  Description of Artificial Sequence: Synthetic oligonucleotide
gaacaugaugg

SEQ ID NO: 984 - RNA, 11 nt, Artificial Sequence
  Description of Artificial Sequence: Synthetic oligonucleotide
auguagacugc

SEQ ID NO: 985 - RNA, 12 nt, Artificial Sequence
  Description of Artificial Sequence: Synthetic oligonucleotide
gaucuauuuaug

SEQ ID NO: 986 - RNA, 11 nt, Artificial Sequence
  Description of Artificial Sequence: Synthetic oligonucleotide
cacuauuauca

SEQ ID NO: 987 - RNA, 10 nt, Artificial Sequence
  Description of Artificial Sequence: Synthetic oligonucleotide
ucaguucugc

SEQ ID NO: 988 - RNA, 12 nt, Artificial Sequence
  Description of Artificial Sequence: Synthetic oligonucleotide
gauuaaaccuac

SEQ ID NO: 989 - RNA, 12 nt, Artificial Sequence
  Description of Artificial Sequence: Synthetic oligonucleotide
uaaaauccuucu

SEQ ID NO: 990 - RNA, 11 nt, Artificial Sequence
  Description of Artificial Sequence: Synthetic oligonucleotide
augcuguagac

SEQ ID NO: 991 - RNA, 12 nt, Artificial Sequence
  Description of Artificial Sequence: Synthetic oligonucleotide
ugauaggaauag

SEQ ID NO: 992 - RNA, 10 nt, Artificial Sequence
  Description of Artificial Sequence: Synthetic oligonucleotide
auggcccuga

SEQ ID NO: 993 - RNA, 10 nt, Artificial Sequence
  Description of Artificial Sequence: Synthetic oligonucleotide
uccucaagca

SEQ ID NO: 994 - RNA, 9 nt, Artificial Sequence
  Description of Artificial Sequence: Synthetic oligonucleotide
uucagccca

SEQ ID NO: 995 - RNA, 10 nt, Artificial Sequence
  Description of Artificial Sequence: Synthetic oligonucleotide
cugcugaacc

SEQ ID NO: 996 - RNA, 11 nt, Artificial Sequence
  Description of Artificial Sequence: Synthetic oligonucleotide
aguucucuuca

SEQ ID NO: 997 - RNA, 10 nt, Artificial Sequence
  Description of Artificial Sequence: Synthetic oligonucleotide
cagccuagag

SEQ ID NO: 998 - RNA, 12 nt, Artificial Sequence
  Description of Artificial Sequence: Synthetic oligonucleotide
ucugugaagugu

SEQ ID NO: 999 - RNA, 13 nt, Artificial Sequence
  Description of Artificial Sequence: Synthetic oligonucleotide
gagaaaauuucaa

SEQ ID NO: 1000 - RNA, 10 nt, Artificial Sequence
  Description of Artificial Sequence: Synthetic oligonucleotide
auccuccuga

SEQ ID NO: 1001 - RNA, 11 nt, Artificial Sequence
  Description of Artificial Sequence: Synthetic oligonucleotide
ugacaucauau

SEQ ID NO: 1002 - RNA, 12 nt, Artificial Sequence
  Description of Artificial Sequence: Synthetic oligonucleotide
aucuucaucaua

SEQ ID NO: 1003 - RNA, 12 nt, Artificial Sequence
  Description of Artificial Sequence: Synthetic oligonucleotide
acuagcuauuaa

SEQ ID NO: 1004 - RNA, 13 nt, Artificial Sequence
  Description of Artificial Sequence: Synthetic oligonucleotide
cucuacuaaaaau

SEQ ID NO: 1005 - RNA, 11 nt, Artificial Sequence
  Description of Artificial Sequence: Synthetic oligonucleotide
cuaucucgccu

SEQ ID NO: 1006 - RNA, 12 nt, Artificial Sequence
  Description of Artificial Sequence: Synthetic oligonucleotide
uucgguccaguu

SEQ ID NO: 1007 - RNA, 10 nt, Artificial Sequence
  Description of Artificial Sequence: Synthetic oligonucleotide
auguagccgc

SEQ ID NO: 1008 - RNA, 11 nt, Artificial Sequence
  Description of Artificial Sequence: Synthetic oligonucleotide
gaggagacuug

SEQ ID NO: 1009 - RNA, 11 nt, Artificial Sequence
  Description of Artificial Sequence: Synthetic oligonucleotide
aguagugagga

SEQ ID NO: 1010 - RNA, 13 nt, Artificial Sequence
  Description of Artificial Sequence: Synthetic oligonucleotide
agaugaguacaaa

SEQ ID NO: 1011 - RNA, 12 nt, Artificial Sequence
  Description of Artificial Sequence: Synthetic oligonucleotide
uuguuaaugggc

SEQ ID NO: 1012 - RNA, 12 nt, Artificial Sequence
  Description of Artificial Sequence: Synthetic oligonucleotide
uuuuaauuuauu

SEQ ID NO: 1013 - RNA, 11 nt, Artificial Sequence
  Description of Artificial Sequence: Synthetic oligonucleotide
auuuaaauaug

SEQ ID NO: 1014 - RNA, 12 nt, Artificial Sequence
  Description of Artificial Sequence: Synthetic oligonucleotide
auccuuuguuuc

SEQ ID NO: 1015 - RNA, 13 nt, Artificial Sequence
  Description of Artificial Sequence: Synthetic oligonucleotide
gucuaaguguuug

SEQ ID NO: 1016 - RNA, 11 nt, Artificial Sequence
  Description of Artificial Sequence: Synthetic oligonucleotide
ccugugacaaa

SEQ ID NO: 1017 - RNA, 12 nt, Artificial Sequence
  Description of Artificial Sequence: Synthetic oligonucleotide
caggcugaauua

SEQ ID NO: 1018 - RNA, 13 nt, Artificial Sequence
  Description of Artificial Sequence: Synthetic oligonucleotide
ucauucuuacaau

SEQ ID NO: 1019 - RNA, 14 nt, Artificial Sequence
  Description of Artificial Sequence: Synthetic oligonucleotide
cauucuuacaauug

SEQ ID NO: 1020 - RNA, 11 nt, Artificial Sequence
  Description of Artificial Sequence: Synthetic oligonucleotide
agagaguguac

SEQ ID NO: 1021 - RNA, 11 nt, Artificial Sequence
  Description of Artificial Sequence: Synthetic oligonucleotide
gaacucagcag

SEQ ID NO: 1022 - RNA, 12 nt, Artificial Sequence
  Description of Artificial Sequence: Synthetic oligonucleotide
uuauuuucagua

SEQ ID NO: 1023 - RNA, 11 nt, Artificial Sequence
  Description of Artificial Sequence: Synthetic oligonucleotide
cuuaaauggaa

SEQ ID NO: 1024 - RNA, 12 nt, Artificial Sequence
  Description of Artificial Sequence: Synthetic oligonucleotide
gccuaaaauugu

SEQ ID NO: 1025 - RNA, 12 nt, Artificial Sequence
  Description of Artificial Sequence: Synthetic oligonucleotide
acuaacaucugg

SEQ ID NO: 1026 - RNA, 11 nt, Artificial Sequence
  Description of Artificial Sequence: Synthetic oligonucleotide
gacugugagcu

SEQ ID NO: 1027 - RNA, 13 nt, Artificial Sequence
  Description of Artificial Sequence: Synthetic oligonucleotide
gcuuuuuauuaau

SEQ ID NO: 1028 - RNA, 12 nt, Artificial Sequence
  Description of Artificial Sequence: Synthetic oligonucleotide
ucuucuuacauu

SEQ ID NO: 1029 - RNA, 14 nt, Artificial Sequence
  Description of Artificial Sequence: Synthetic oligonucleotide
auuuguaaaaaugu

SEQ ID NO: 1030 - RNA, 14 nt, Artificial Sequence
  Description of Artificial Sequence: Synthetic oligonucleotide
ucuuaauucauauu

SEQ ID NO: 1031 - RNA, 12 nt, Artificial Sequence
  Description of Artificial Sequence: Synthetic oligonucleotide
aacuaaucauga

SEQ ID NO: 1032 - RNA, 11 nt, Artificial Sequence
  Description of Artificial Sequence: Synthetic oligonucleotide
cugcucuuggg

SEQ ID NO: 1033 - RNA, 12 nt, Artificial Sequence
  Description of Artificial Sequence: Synthetic oligonucleotide
aguagcuuugag

SEQ ID NO: 1034 - RNA, 13 nt, Artificial Sequence
  Description of Artificial Sequence: Synthetic oligonucleotide
acguaauauuuca

SEQ ID NO: 1035 - RNA, 12 nt, Artificial Sequence
  Description of Artificial Sequence: Synthetic oligonucleotide
auucucuucacu

SEQ ID NO: 1036 - RNA, 13 nt, Artificial Sequence
  Description of Artificial Sequence: Synthetic oligonucleotide
uaaugcuaagaaa

SEQ ID NO: 1037 - RNA, 11 nt, Artificial Sequence
  Description of Artificial Sequence: Synthetic oligonucleotide
cugaaaaucaa

SEQ ID NO: 1038 - RNA, 13 nt, Artificial Sequence
  Description of Artificial Sequence: Synthetic oligonucleotide
auaugauuacuuu

SEQ ID NO: 1039 - RNA, 13 nt, Artificial Sequence
  Description of Artificial Sequence: Synthetic oligonucleotide
auuuuguucuaca

SEQ ID NO: 1040 - RNA, 11 nt, Artificial Sequence
  Description of Artificial Sequence: Synthetic oligonucleotide
ccgggacucuc

SEQ ID NO: 1041 - RNA, 13 nt, Artificial Sequence
  Description of Artificial Sequence: Synthetic oligonucleotide
cuuuaaaguaaag

SEQ ID NO: 1042 - RNA, 12 nt, Artificial Sequence
  Description of Artificial Sequence: Synthetic oligonucleotide
cuggaagccugg

SEQ ID NO: 1043 - RNA, 13 nt, Artificial Sequence
  Description of Artificial Sequence: Synthetic oligonucleotide
aaacaaaagagag

SEQ ID NO: 1044 - RNA, 12 nt, Artificial Sequence
  Description of Artificial Sequence: Synthetic oligonucleotide
ucaguuaugccg

SEQ ID NO: 1045 - RNA, 12 nt, Artificial Sequence
  Description of Artificial Sequence: Synthetic oligonucleotide
aaaagaagucca

SEQ ID NO: 1046 - RNA, 10 nt, Artificial Sequence
  Description of Artificial Sequence: Synthetic oligonucleotide
ggugagguua

SEQ ID NO: 1047 - RNA, 10 nt, Artificial Sequence
  Description of Artificial Sequence: Synthetic oligonucleotide
ggaagaggac

SEQ ID NO: 1048 - RNA, 12 nt, Artificial Sequence
  Description of Artificial Sequence: Synthetic oligonucleotide
agcaaguauugu

SEQ ID NO: 1049 - RNA, 11 nt, Artificial Sequence
  Description of Artificial Sequence: Synthetic oligonucleotide
uuguagcacuc

SEQ ID NO: 1050 - RNA, 13 nt, Artificial Sequence
  Description of Artificial Sequence: Synthetic oligonucleotide
caaaaccacaaau

SEQ ID NO: 1051 - RNA, 11 nt, Artificial Sequence
  Description of Artificial Sequence: Synthetic oligonucleotide
aagcccauaca

SEQ ID NO: 1052 - RNA, 10 nt, Artificial Sequence
  Description of Artificial Sequence: Synthetic oligonucleotide
gcccauacag

SEQ ID NO: 1053 - RNA, 11 nt, Artificial Sequence
  Description of Artificial Sequence: Synthetic oligonucleotide
agaaaccuucc

SEQ ID NO: 1054 - RNA, 9 nt, Artificial Sequence
  Description of Artificial Sequence: Synthetic oligonucleotide
uauaccuac

SEQ ID NO: 1055 - RNA, 12 nt, Artificial Sequence
  Description of Artificial Sequence: Synthetic oligonucleotide
ccaguuuucgga

SEQ ID NO: 1056 - RNA, 8 nt, Artificial Sequence
  Description of Artificial Sequence: Synthetic oligonucleotide
gaacaggg

SEQ ID NO: 1057 - RNA, 12 nt, Artificial Sequence
  Description of Artificial Sequence: Synthetic oligonucleotide
uaacuuuccagu

SEQ ID NO: 1058 - RNA, 13 nt, Artificial Sequence
  Description of Artificial Sequence: Synthetic oligonucleotide
aaguuugguuuug

SEQ ID NO: 1059 - RNA, 11 nt, Artificial Sequence
  Description of Artificial Sequence: Synthetic oligonucleotide
uucccacugua

SEQ ID NO: 1060 - RNA, 12 nt, Artificial Sequence
  Description of Artificial Sequence: Synthetic oligonucleotide
gauaccauauga

SEQ ID NO: 1061 - RNA, 10 nt, Artificial Sequence
  Description of Artificial Sequence: Synthetic oligonucleotide
acaugggcug

SEQ ID NO: 1062 - RNA, 12 nt, Artificial Sequence
  Description of Artificial Sequence: Synthetic oligonucleotide
aacuuuuucaua

SEQ ID NO: 1063 - RNA, 11 nt, Artificial Sequence
  Description of Artificial Sequence: Synthetic oligonucleotide
augaggccgga

SEQ ID NO: 1064 - RNA, 10 nt, Artificial Sequence
  Description of Artificial Sequence: Synthetic oligonucleotide
cugcauuugu

SEQ ID NO: 1065 - RNA, 12 nt, Artificial Sequence
  Description of Artificial Sequence: Synthetic oligonucleotide
auguuuacuacc

SEQ ID NO: 1066 - RNA, 14 nt, Artificial Sequence
  Description of Artificial Sequence: Synthetic oligonucleotide
auuuuuugaugaaa

SEQ ID NO: 1067 - RNA, 13 nt, Artificial Sequence
  Description of Artificial Sequence: Synthetic oligonucleotide
agugugugaauuu

SEQ ID NO: 1068 - RNA, 12 nt, Artificial Sequence
  Description of Artificial Sequence: Synthetic oligonucleotide
agcaauguaugu

SEQ ID NO: 1069 - RNA, 13 nt, Artificial Sequence
  Description of Artificial Sequence: Synthetic oligonucleotide
aagcacauauaua

SEQ ID NO: 1070 - RNA, 13 nt, Artificial Sequence
  Description of Artificial Sequence: Synthetic oligonucleotide
uaauaguuucucc

SEQ ID NO: 1071 - RNA, 12 nt, Artificial Sequence
  Description of Artificial Sequence: Synthetic oligonucleotide
guuucuccaaau

SEQ ID NO: 1072 - RNA, 12 nt, Artificial Sequence
  Description of Artificial Sequence: Synthetic oligonucleotide
acuuccuagaaa

SEQ ID NO: 1073 - RNA, 12 nt, Artificial Sequence
  Description of Artificial Sequence: Synthetic oligonucleotide
acaccauauaug

SEQ ID NO: 1074 - RNA, 13 nt, Artificial Sequence
  Description of Artificial Sequence: Synthetic oligonucleotide
uauaugaauggag

SEQ ID NO: 1075 - RNA, 12 nt, Artificial Sequence
  Description of Artificial Sequence: Synthetic oligonucleotide
cauuuacaggga

SEQ ID NO: 1076 - RNA, 12 nt, Artificial Sequence
  Description of Artificial Sequence: Synthetic oligonucleotide
auuuacagggac

SEQ ID NO: 1077 - RNA, 9 nt, Artificial Sequence
  Description of Artificial Sequence: Synthetic oligonucleotide
gggaccuga

SEQ ID NO: 1078 - RNA, 13 nt, Artificial Sequence
  Description of Artificial Sequence: Synthetic oligonucleotide
guuugacugcauc

SEQ ID NO: 1079 - RNA, 12 nt, Artificial Sequence
  Description of Artificial Sequence: Synthetic oligonucleotide
uugacugcaucg

SEQ ID NO: 1080 - RNA, 11 nt, Artificial Sequence
  Description of Artificial Sequence: Synthetic oligonucleotide
aguucacaggg

SEQ ID NO: 1081 - RNA, 12 nt, Artificial Sequence
  Description of Artificial Sequence: Synthetic oligonucleotide
gcaccucugucc

SEQ ID NO: 1082 - RNA, 14 nt, Artificial Sequence
  Description of Artificial Sequence: Synthetic oligonucleotide
guuugucuuuuuaa

SEQ ID NO: 1083 - RNA, 13 nt, Artificial Sequence
  Description of Artificial Sequence: Synthetic oligonucleotide
uugucuuuuuaag

SEQ ID NO: 1084 - RNA, 12 nt, Artificial Sequence
  Description of Artificial Sequence: Synthetic oligonucleotide
cuaaagguuguc

SEQ ID NO: 1085 - RNA, 11 nt, Artificial Sequence
  Description of Artificial Sequence: Synthetic oligonucleotide
agguugucgac

SEQ ID NO: 1086 - RNA, 12 nt, Artificial Sequence
  Description of Artificial Sequence: Synthetic oligonucleotide
ccuggcaauugu

SEQ ID NO: 1087 - RNA, 11 nt, Artificial Sequence
  Description of Artificial Sequence: Synthetic oligonucleotide
guggugcgagg

SEQ ID NO: 1088 - RNA, 12 nt, Artificial Sequence
  Description of Artificial Sequence: Synthetic oligonucleotide
gagacaugaaau

SEQ ID NO: 1089 - RNA, 12 nt, Artificial Sequence
  Description of Artificial Sequence: Synthetic oligonucleotide
uauauuucucca

SEQ ID NO: 1090 - RNA, 9 nt, Artificial Sequence
  Description of Artificial Sequence: Synthetic oligonucleotide
augaaggcu

SEQ ID NO: 1091 - RNA, 10 nt, Artificial Sequence
  Description of Artificial Sequence: Synthetic oligonucleotide
cuggaguggu

SEQ ID NO: 1092 - RNA, 10 nt, Artificial Sequence
  Description of Artificial Sequence: Synthetic oligonucleotide
ggaagagagg

SEQ ID NO: 1093 - RNA, 11 nt, Artificial Sequence
  Description of Artificial Sequence: Synthetic oligonucleotide
uugcaucgggc

SEQ ID NO: 1094 - RNA, 12 nt, Artificial Sequence
  Description of Artificial Sequence: Synthetic oligonucleotide
uauccuacugug

SEQ ID NO: 1095 - RNA, 12 nt, Artificial Sequence
  Description of Artificial Sequence: Synthetic oligonucleotide
ccuacuguguaa

SEQ ID NO: 1096 - RNA, 11 nt, Artificial Sequence
  Description of Artificial Sequence: Synthetic oligonucleotide
cuuguagugua

SEQ ID NO: 1097 - RNA, 12 nt, Artificial Sequence
  Description of Artificial Sequence: Synthetic oligonucleotide
cuuuguugauug

SEQ ID NO: 1098 - RNA, 13 nt, Artificial Sequence
  Description of Artificial Sequence: Synthetic oligonucleotide
uuguugauugaaa

SEQ ID NO: 1099 - RNA, 14 nt, Artificial Sequence
  Description of Artificial Sequence: Synthetic oligonucleotide
ucuuuuucuuccau

SEQ ID NO: 1100 - RNA, 12 nt, Artificial Sequence
  Description of Artificial Sequence: Synthetic oligonucleotide
aucuuccuucua

SEQ ID NO: 1101 - RNA, 12 nt, Artificial Sequence
  Description of Artificial Sequence: Synthetic oligonucleotide
ugaaugcuucau

SEQ ID NO: 1102 - RNA, 12 nt, Artificial Sequence
  Description of Artificial Sequence: Synthetic oligonucleotide
gaaugcuucaug

SEQ ID NO: 1103 - RNA, 12 nt, Artificial Sequence
  Description of Artificial Sequence: Synthetic oligonucleotide
auucuacuuuga

SEQ ID NO: 1104 - RNA, 12 nt, Artificial Sequence
  Description of Artificial Sequence: Synthetic oligonucleotide
gcaacuacagac

SEQ ID NO: 1105 - RNA, 12 nt, Artificial Sequence
  Description of Artificial Sequence: Synthetic oligonucleotide
accaaggucaac

SEQ ID NO: 1106 - RNA, 12 nt, Artificial Sequence
  Description of Artificial Sequence: Synthetic oligonucleotide
gacuaucucgac

SEQ ID NO: 1107 - RNA, 12 nt, Artificial Sequence
  Description of Artificial Sequence: Synthetic oligonucleotide
accuucccaaac

SEQ ID NO: 1108 - RNA, 13 nt, Artificial Sequence
  Description of Artificial Sequence: Synthetic oligonucleotide
caagcuuagaacu

SEQ ID NO: 1109 - RNA, 14 nt, Artificial Sequence
  Description of Artificial Sequence: Synthetic oligonucleotide
gcuuagaacuuuaa

SEQ ID NO: 1110 - RNA, 13 nt, Artificial Sequence
  Description of Artificial Sequence: Synthetic oligonucleotide
aacuuuaagcaac

SEQ ID NO: 1111 - RNA, 10 nt, Artificial Sequence
  Description of Artificial Sequence: Synthetic oligonucleotide
agaccaccac

SEQ ID NO: 1112 - RNA, 13 nt, Artificial Sequence
  Description of Artificial Sequence: Synthetic oligonucleotide
cgagaaauaaagu

SEQ ID NO: 1113 - RNA, 13 nt, Artificial Sequence
  Description of Artificial Sequence: Synthetic oligonucleotide
gagaaauaaaguu

SEQ ID NO: 1114 - RNA, 11 nt, Artificial Sequence
  Description of Artificial Sequence: Synthetic oligonucleotide
ggaaaugaucc

SEQ ID NO: 1115 - RNA, 12 nt, Artificial Sequence
  Description of Artificial Sequence: Synthetic oligonucleotide
aagaaaugaaac

SEQ ID NO: 1116 - RNA, 12 nt, Artificial Sequence
  Description of Artificial Sequence: Synthetic oligonucleotide
uuuccauccucc

SEQ ID NO: 1117 - RNA, 14 nt, Artificial Sequence
  Description of Artificial Sequence: Synthetic oligonucleotide
cugaaaaucuuuga

SEQ ID NO: 1118 - RNA, 10 nt, Artificial Sequence
  Description of Artificial Sequence: Synthetic oligonucleotide
gccguucagg

SEQ ID NO: 1119 - RNA, 12 nt, Artificial Sequence
  Description of Artificial Sequence: Synthetic oligonucleotide
aggguccagaag

SEQ ID NO: 1120 - RNA, 12 nt, Artificial Sequence
  Description of Artificial Sequence: Synthetic oligonucleotide
caagacugcuug

SEQ ID NO: 1121 - RNA, 12 nt, Artificial Sequence
  Description of Artificial Sequence: Synthetic oligonucleotide
ccaugucuuugg

SEQ ID NO: 1122 - RNA, 10 nt, Artificial Sequence
  Description of Artificial Sequence: Synthetic oligonucleotide
ccugaaacac

SEQ ID NO: 1123 - RNA, 11 nt, Artificial Sequence
  Description of Artificial Sequence: Synthetic oligonucleotide
cucuguaccuc

SEQ ID NO: 1124 - RNA, 11 nt, Artificial Sequence
  Description of Artificial Sequence: Synthetic oligonucleotide
gcaagacaaga

SEQ ID NO: 1125 - RNA, 12 nt, Artificial Sequence
  Description of Artificial Sequence: Synthetic oligonucleotide
caagacaagaaa

SEQ ID NO: 1126 - RNA, 11 nt, Artificial Sequence
  Description of Artificial Sequence: Synthetic oligonucleotide
guacaagaucc

SEQ ID NO: 1127 - RNA, 11 nt, Artificial Sequence
  Description of Artificial Sequence: Synthetic oligonucleotide
guacuugcaga

SEQ ID NO: 1128 - RNA, 12 nt, Artificial Sequence
  Description of Artificial Sequence: Synthetic oligonucleotide
gaucgauacaga

SEQ ID NO: 1129 - RNA, 12 nt, Artificial Sequence
  Description of Artificial Sequence: Synthetic oligonucleotide
auaaaaauaaau

SEQ ID NO: 1130 - RNA, 12 nt, Artificial Sequence
  Description of Artificial Sequence: Synthetic oligonucleotide
aaaaauaaauau

SEQ ID NO: 1131 - RNA, 12 nt, Artificial Sequence
  Description of Artificial Sequence: Synthetic oligonucleotide
uugacugcugug

SEQ ID NO: 1132 - RNA, 12 nt, Artificial Sequence
  Description of Artificial Sequence: Synthetic oligonucleotide
gagaugagagac

SEQ ID NO: 1133 - RNA, 9 nt, Artificial Sequence
  Description of Artificial Sequence: Synthetic oligonucleotide
cccacuugg

SEQ ID NO: 1134 - RNA, 3665 nt, Homo sapiens
ggcuuggggcagccggguagcucggaggucguggcgcugggggcuagcaccagcgcucugucgggaggcgcagcgguuagguggaccggucagcggacucaccggccagggcgcucggugcuggaauuugauauucauugauccggguuuuaucccucuucuuuuuucuuaaacauuuuuuuuuaaaacuguauuguuucucguuuuaauuuauuuuugcuugccauuccccacuugaaucgggccgacggcuuggggagauugcucuacuuccccaaaucacuguggauuuuggaaaccagcagaaagaggaaagagguagcaagagcuccagagagaagucgaggaagagagagacggggucagagagagcgcgcgggcgugcgagcagcgaaagcgacaggggcaaagugagugaccugcuuuugggggugaccgccggagcgcggcgugagcccucccccuugggaucccgcagcugaccagucgcgcugacggacagacagacagacaccgcccccagccccagcuaccaccuccuccccggccggcggcggacaguggacgcggcggcgagccgcgggcaggggccggagcccgcgcccggaggcgggguggagggggucggggcucgcggcgucgcacugaaacuuuucguccaacuucugggcuguucucgcuucggaggagccgugguccgcgcgggggaagccgagccgagcggagccgcgagaagugcuagcucgggccgggaggagccgcagccggaggagggggaggaggaagaagagaaggaagaggagagggggccgcaguggcgacucggcgcucggaagccgggcucauggacgggugaggcggcggugugcgcagacagugcuccagccgcgcgcgcuccccaggcccuggcccgggccucgggccggggaggaagaguagcucgccgaggcgccgaggagagcgggccgccccacagcccgagccggagagggagcgcgagccgcgccggccccggucgggccuccgaaaccaugaacuuucugcugucuugggugcauuggagccuugccuugcugcucuaccuccaccaugccaaguggucccaggcugcacccauggcagaaggaggagggcagaaucaucacgaaguggugaaguucauggaugucuaucagcgcagcuacugccauccaaucgagacccugguggacaucuuccaggaguacccugaugagaucgaguacaucuucaagccauccugugugccccugaugcgaugcgggggcugcugcaaugacgagggccuggagugugugcccacugaggaguccaacaucaccaugcagauuaugcggaucaaaccucaccaaggccagcacauaggagagaugagcuuccuacagcacaacaaaugugaaugcagaccaaagaaagauagagcaagacaagaaaaaaaaucaguucgaggaaagggaaaggggcaaaaacgaaagcgcaagaaaucccgguauaaguccuggagcguguacguuggugcccgcugcugucuaaugcccuggagccucccuggcccccaucccugugggccuugcucagagcggagaaagcauuuguuuguacaagauccgcagacguguaaauguuccugcaaaaacacagacucgcguugcaaggcgaggcagcuugaguuaaacgaacguacuugcagaugugacaagccgaggcggugagccgggcaggaggaaggagccucccucaggguuucgggaaccagaucucucaccaggaaagacugauacagaacgaucgauacagaaaccacgcugccgccaccacaccaucaccaucgacagaacaguccuuaauccagaaaccugaaaugaaggaagaggagacucugcgcagagcacuuuggguccggagggcgagacuccggcggaagcauucccgggcgggugacccagcacggucccucuuggaauuggauucgccauuuuauuuuucuugcugcuaaaucaccgagcccggaagauuagagaguuuuauuucugggauuccuguagacacacccacccacauacauacauuuauauauauauauauuauauauauauaaaaauaaauaucucuauuuuauauauauaaaauauauauauucuuuuuuuaaauuaacagugcuaauguuauuggugucuucacuggauguauuugacugcuguggacuugaguugggaggggaauguucccacucagauccugacagggaagaggaggagaugagagacucuggcaugaucuuuuuuuugucccacuugguggggccaggguccucuccccugcccaggaaugugcaaggccagggcaugggggcaaauaugacccaguuuugggaacaccgacaaacccagcccuggcgcugagccucucuaccccaggucagacggacagaaagacagaucacagguacagggaugaggacaccggcucugaccaggaguuuggggagcuucaggacauugcugugcuuuggggauucccuccacaugcugcacgcgcaucucgcccccaggggcacugccuggaagauucaggagccugggcggccuucgcuuacucucaccugcuucugaguugcccaggagaccacuggcagaugucccggcgaagagaagagacacauuguuggaagaagcagcccaugacagcuccccuuccugggacucgcccucauccucuuccugcuccccuuccuggggugcagccuaaaaggaccuauguccucacaccauugaaaccacuaguucuguccccccaggagaccugguugugugugugugagugguugaccuuccuccauccccugguccuucccuucccuucccgaggcacagagagacagggcaggauccacgugcccauuguggaggcagagaaaagagaaaguguuuuauauacgguacuuauuuaauaucccuuuuuaauuagaaauuaaaacaguuaauuuaauuaaagaguaggguuuuuuuucaguauucuugguuaauauuuaauuucaacuauuuaugagauguaucuuuugcucucucuugcucucuuauuuguaccgguuuuuguauauaaaauucauguuuccaaucucucucucccugaucggugacagucacuagcuuaucuugaacagauauuuaauuuugcuaacacucagcucugcccuccccgauccccuggcuccccagcacacauuccuuugaaauaagguuucaauauacaucuacauacuauauauauauuuggcaacuuguauuuguguguauauauauauauauauguuuauguauauaugugauucugauaaaauagacauugcuauucuguuuuuuauauguaaaaacaaaacaagaaaaaauagagaauucuacauacuaaaucucucuccuuuuuuaauuuuaauauuuguuaucauuuauuuauuggugcuacuguuuauccguaauaauuguggggaaaagauauuaacaucacgucuuugucucuagugcaguuuuucgagauauuccguaguacauauuuauuuuuaaacaacgacaaagaaauacagauauaucuuaaaaaaaaaaaagcauuuuguauuaaagaauuuaauucugaucucaaaaaaaaaaaaa

SEQ ID NO: 1135 - RNA, 3614 nt, Homo sapiens
ggcuuggggcagccggguagcucggaggucguggcgcugggggcuagcaccagcgcucugucgggaggcgcagcgguuagguggaccggucagcggacucaccggccagggcgcucggugcuggaauuugauauucauugauccggguuuuaucccucuucuuuuuucuuaaacauuuuuuuuuaaaacuguauuguuucucguuuuaauuuauuuuugcuugccauuccccacuugaaucgggccgacggcuuggggagauugcucuacuuccccaaaucacuguggauuuuggaaaccagcagaaagaggaaagagguagcaagagcuccagagagaagucgaggaagagagagacggggucagagagagcgcgcgggcgugcgagcagcgaaagcgacaggggcaaagugagugaccugcuuuugggggugaccgccggagcgcggcgugagcccucccccuugggaucccgcagcugaccagucgcgcugacggacagacagacagacaccgcccccagccccagcuaccaccuccuccccggccggcggcggacaguggacgcggcggcgagccgcgggcaggggccggagcccgcgcccggaggcgggguggagggggucggggcucgcggcgucgcacugaaacuuuucguccaacuucugggcuguucucgcuucggaggagccgugguccgcgcgggggaagccgagccgagcggagccgcgagaagugcuagcucgggccgggaggagccgcagccggaggagggggaggaggaagaagagaaggaagaggagagggggccgcaguggcgacucggcgcucggaagccgggcucauggacgggugaggcggcggugugcgcagacagugcuccagccgcgcgcgcuccccaggcccuggcccgggccucgggccggggaggaagaguagcucgccgaggcgccgaggagagcgggccgccccacagcccgagccggagagggagcgcgagccgcgccggccccggucgggccuccgaaaccaugaacuuucugcugucuugggugcauuggagccuugccuugcugcucuaccuccaccaugccaaguggucccaggcugcacccauggcagaaggaggagggcagaaucaucacgaaguggugaaguucauggaugucuaucagcgcagcuacugccauccaaucgagacccugguggacaucuuccaggaguacccugaugagaucgaguacaucuucaagccauccugugugccccugaugcgaugcgggggcugcugcaaugacgagggccuggagugugugcccacugaggaguccaacaucaccaugcagauuaugcggaucaaaccucaccaaggccagcacauaggagagaugagcuuccuacagcacaacaaaugugaaugcagaccaaagaaagauagagcaagacaagaaaaaaaaucaguucgaggaaagggaaaggggcaaaaacgaaagcgcaagaaaucccgguauaaguccuggagcguucccugugggccuugcucagagcggagaaagcauuuguuuguacaagauccgcagacguguaaauguuccugcaaaaacacagacucgcguugcaaggcgaggcagcuugaguuaaacgaacguacuugcagaugugacaagccgaggcggugagccgggcaggaggaaggagccucccucaggguuucgggaaccagaucucucaccaggaaagacugauacagaacgaucgauacagaaaccacgcugccgccaccacaccaucaccaucgacagaacaguccuuaauccagaaaccugaaaugaaggaagaggagacucugcgcagagcacuuuggguccggagggcgagacuccggcggaagcauucccgggcgggugacccagcacggucccucuuggaauuggauucgccauuuuauuuuucuugcugcuaaaucaccgagcccggaagauuagagaguuuuauuucugggauuccuguagacacacccacccacauacauacauuuauauauauauauauuauauauauauaaaaauaaauaucucuauuuuauauauauaaaauauauauauucuuuuuuuaaauuaacagugcuaauguuauuggugucuucacuggauguauuugacugcuguggacuugaguugggaggggaauguucccacucagauccugacagggaagaggaggagaugagagacucuggcaugaucuuuuuuuugucccacuugguggggccaggguccucuccccugcccaggaaugugcaaggccagggcaugggggcaaauaugacccaguuuugggaacaccgacaaacccagcccuggcgcugagccucucuaccccaggucagacggacagaaagacagaucacagguacagggaugaggacaccggcucugaccaggaguuuggggagcuucaggacauugcugugcuuuggggauucccuccacaugcugcacgcgcaucucgcccccaggggcacugccuggaagauucaggagccugggcggccuucgcuuacucucaccugcuucugaguugcccaggagaccacuggcagaugucccggcgaagagaagagacacauuguuggaagaagcagcccaugacagcuccccuuccugggacucgcccucauccucuuccugcuccccuuccuggggugcagccuaaaaggaccuauguccucacaccauugaaaccacuaguucuguccccccaggagaccugguugugugugugugagugguugaccuuccuccauccccugguccuucccuucccuucccgaggcacagagagacagggcaggauccacgugcccauuguggaggcagagaaaagagaaaguguuuuauauacgguacuuauuuaauaucccuuuuuaauuagaaauuaaaacaguuaauuuaauuaaagaguaggguuuuuuuucaguauucuugguuaauauuuaauuucaacuauuuaugagauguaucuuuugcucucucuugcucucuuauuuguaccgguuuuuguauauaaaauucauguuuccaaucucucucucccugaucggugacagucacuagcuuaucuugaacagauauuuaauuuugcuaacacucagcucugcccuccccgauccccuggcuccccagcacacauuccuuugaaauaagguuucaauauacaucuacauacuauauauauauuuggcaacuuguauuuguguguauauauauauauauauguuuauguauauaugugauucugauaaaauagacauugcuauucuguuuuuuauauguaaaaacaaaacaagaaaaaauagagaauucuacauacuaaaucucucuccuuuuuuaauuuuaauauuuguuaucauuuauuuauuggugcuacuguuuauccguaauaauuguggggaaaagauauuaacaucacgucuuugucucuagugcaguuuuucgagauauuccguaguacauauuuauuuuuaaacaacgacaaagaaauacagauauaucuuaaaaaaaaaaaagcauuuuguauuaaagaauuuaauucugaucucaaaaaaaaaaaaa

SEQ ID NO: 1136 - RNA, 3596 nt, Homo sapiens
ggcuuggggcagccggguagcucggaggucguggcgcugggggcuagcaccagcgcucugucgggaggcgcagcgguuagguggaccggucagcggacucaccggccagggcgcucggugcuggaauuugauauucauugauccggguuuuaucccucuucuuuuuucuuaaacauuuuuuuuuaaaacuguauuguuucucguuuuaauuuauuuuugcuugccauuccccacuugaaucgggccgacggcuuggggagauugcucuacuuccccaaaucacuguggauuuuggaaaccagcagaaagaggaaagagguagcaagagcuccagagagaagucgaggaagagagagacggggucagagagagcgcgcgggcgugcgagcagcgaaagcgacaggggcaaagugagugaccugcuuuugggggugaccgccggagcgcggcgugagcccucccccuugggaucccgcagcugaccagucgcgcugacggacagacagacagacaccgcccccagccccagcuaccaccuccuccccggccggcggcggacaguggacgcggcggcgagccgcgggcaggggccggagcccgcgcccggaggcgggguggagggggucggggcucgcggcgucgcacugaaacuuuucguccaacuucugggcuguucucgcuucggaggagccgugguccgcgcgggggaagccgagccgagcggagccgcgagaagugcuagcucgggccgggaggagccgcagccggaggagggggaggaggaagaagagaaggaagaggagagggggccgcaguggcgacucggcgcucggaagccgggcucauggacgggugaggcggcggugugcgcagacagugcuccagccgcgcgcgcuccccaggcccuggcccgggccucgggccggggaggaagaguagcucgccgaggcgccgaggagagcgggccgccccacagcccgagccggagagggagcgcgagccgcgccggccccggucgggccuccgaaaccaugaacuuucugcugucuugggugcauuggagccuugccuugcugcucuaccuccaccaugccaaguggucccaggcugcacccauggcagaaggaggagggcagaaucaucacgaaguggugaaguucauggaugucuaucagcgcagcuacugccauccaaucgagacccugguggacaucuuccaggaguacccugaugagaucgaguacaucuucaagccauccugugugccccugaugcgaugcgggggcugcugcaaugacgagggccuggagugugugcccacugaggaguccaacaucaccaugcagauuaugcggaucaaaccucaccaaggccagcacauaggagagaugagcuuccuacagcacaacaaaugugaaugcagaccaaagaaagauagagcaagacaagaaaaaaaaucaguucgaggaaagggaaaggggcaaaaacgaaagcgcaagaaaucccgucccugugggccuugcucagagcggagaaagcauuuguuuguacaagauccgcagacguguaaauguuccugcaaaaacacagacucgcguugcaaggcgaggcagcuugaguuaaacgaacguacuugcagaugugacaagccgaggcggugagccgggcaggaggaaggagccucccucaggguuucgggaaccagaucucucaccaggaaagacugauacagaacgaucgauacagaaaccacgcugccgccaccacaccaucaccaucgacagaacaguccuuaauccagaaaccugaaaugaaggaagaggagacucugcgcagagcacuuuggguccggagggcgagacuccggcggaagcauucccgggcgggugacccagcacggucccucuuggaauuggauucgccauuuuauuuuucuugcugcuaaaucaccgagcccggaagauuagagaguuuuauuucugggauuccuguagacacacccacccacauacauacauuuauauauauauauauuauauauauauaaaaauaaauaucucuauuuuauauauauaaaauauauauauucuuuuuuuaaauuaacagugcuaauguuauuggugucuucacuggauguauuugacugcuguggacuugaguugggaggggaauguucccacucagauccugacagggaagaggaggagaugagagacucuggcaugaucuuuuuuuugucccacuugguggggccaggguccucuccccugcccaggaaugugcaaggccagggcaugggggcaaauaugacccaguuuugggaacaccgacaaacccagcccuggcgcugagccucucuaccccaggucagacggacagaaagacagaucacagguacagggaugaggacaccggcucugaccaggaguuuggggagcuucaggacauugcugugcuuuggggauucccuccacaugcugcacgcgcaucucgcccccaggggcacugccuggaagauucaggagccugggcggccuucgcuuacucucaccugcuucugaguugcccaggagaccacuggcagaugucccggcgaagagaagagacacauuguuggaagaagcagcccaugacagcuccccuuccugggacucgcccucauccucuuccugcuccccuuccuggggugcagccuaaaaggaccuauguccucacaccauugaaaccacuaguucuguccccccaggagaccugguugugugugugugagugguugaccuuccuccauccccugguccuucccuucccuucccgaggcacagagagacagggcaggauccacgugcccauuguggaggcagagaaaagagaaaguguuuuauauacgguacuuauuuaauaucccuuuuuaauuagaaauuaaaacaguuaauuuaauuaaagaguaggguuuuuuuucaguauucuugguuaauauuuaauuucaacuauuuaugagauguaucuuuugcucucucuugcucucuuauuuguaccgguuuuuguauauaaaauucauguuuccaaucucucucucccugaucggugacagucacuagcuuaucuugaacagauauuuaauuuugcuaacacucagcucugcccuccccgauccccuggcuccccagcacacauuccuuugaaauaagguuucaauauacaucuacauacuauauauauauuuggcaacuuguauuuguguguauauauauauauauauguuuauguauauaugugauucugauaaaauagacauugcuauucuguuuuuuauauguaaaaacaaaacaagaaaaaauagagaauucuacauacuaaaucucucuccuuuuuuaauuuuaauauuuguuaucauuuauuuauuggugcuacuguuuauccguaauaauuguggggaaaagauauuaacaucacgucuuugucucuagugcaguuuuucgagauauuccguaguacauauuuauuuuuaaacaacgacaaagaaauacagauauaucuuaaaaaaaaaaaagcauuuuguauuaaagaauuuaauucugaucucaaaaaaaaaaaaa

SEQ ID NO: 1137 - RNA, 3542 nt, Homo sapiens
ggcuuggggcagccggguagcucggaggucguggcgcugggggcuagcaccagcgcucugucgggaggcgcagcgguuagguggaccggucagcggacucaccggccagggcgcucggugcuggaauuugauauucauugauccggguuuuaucccucuucuuuuuucuuaaacauuuuuuuuuaaaacuguauuguuucucguuuuaauuuauuuuugcuugccauuccccacuugaaucgggccgacggcuuggggagauugcucuacuuccccaaaucacuguggauuuuggaaaccagcagaaagaggaaagagguagcaagagcuccagagagaagucgaggaagagagagacggggucagagagagcgcgcgggcgugcgagcagcgaaagcgacaggggcaaagugagugaccugcuuuugggggugaccgccggagcgcggcgugagcccucccccuugggaucccgcagcugaccagucgcgcugacggacagacagacagacaccgcccccagccccagcuaccaccuccuccccggccggcggcggacaguggacgcggcggcgagccgcgggcaggggccggagcccgcgcccggaggcgggguggagggggucggggcucgcggcgucgcacugaaacuuuucguccaacuucugggcuguucucgcuucggaggagccgugguccgcgcgggggaagccgagccgagcggagccgcgagaagugcuagcucgggccgggaggagccgcagccggaggagggggaggaggaagaagagaaggaagaggagagggggccgcaguggcgacucggcgcucggaagccgggcucauggacgggugaggcggcggugugcgcagacagugcuccagccgcgcgcgcuccccaggcccuggcccgggccucgggccggggaggaagaguagcucgccgaggcgccgaggagagcgggccgccccacagcccgagccggagagggagcgcgagccgcgccggccccggucgggccuccgaaaccaugaacuuucugcugucuugggugcauuggagccuugccuugcugcucuaccuccaccaugccaaguggucccaggcugcacccauggcagaaggaggagggcagaaucaucacgaaguggugaaguucauggaugucuaucagcgcagcuacugccauccaaucgagacccugguggacaucuuccaggaguacccugaugagaucgaguacaucuucaagccauccugugugccccugaugcgaugcgggggcugcugcaaugacgagggccuggagugugugcccacugaggaguccaacaucaccaugcagauuaugcggaucaaaccucaccaaggccagcacauaggagagaugagcuuccuacagcacaacaaaugugaaugcagaccaaagaaagauagagcaagacaagaaaaucccugugggccuugcucagagcggagaaagcauuuguuuguacaagauccgcagacguguaaauguuccugcaaaaacacagacucgcguugcaaggcgaggcagcuugaguuaaacgaacguacuugcagaugugacaagccgaggcggugagccgggcaggaggaaggagccucccucaggguuucgggaaccagaucucucaccaggaaagacugauacagaacgaucgauacagaaaccacgcugccgccaccacaccaucaccaucgacagaacaguccuuaauccagaaaccugaaaugaaggaagaggagacucugcgcagagcacuuuggguccggagggcgagacuccggcggaagcauucccgggcgggugacccagcacggucccucuuggaauuggauucgccauuuuauuuuucuugcugcuaaaucaccgagcccggaagauuagagaguuuuauuucugggauuccuguagacacacccacccacauacauacauuuauauauauauauauuauauauauauaaaaauaaauaucucuauuuuauauauauaaaauauauauauucuuuuuuuaaauuaacagugcuaauguuauuggugucuucacuggauguauuugacugcuguggacuugaguugggaggggaauguucccacucagauccugacagggaagaggaggagaugagagacucuggcaugaucuuuuuuuugucccacuugguggggccaggguccucuccccugcccaggaaugugcaaggccagggcaugggggcaaauaugacccaguuuugggaacaccgacaaacccagcccuggcgcugagccucucuaccccaggucagacggacagaaagacagaucacagguacagggaugaggacaccggcucugaccaggaguuuggggagcuucaggacauugcugugcuuuggggauucccuccacaugcugcacgcgcaucucgcccccaggggcacugccuggaagauucaggagccugggcggccuucgcuuacucucaccugcuucugaguugcccaggagaccacuggcagaugucccggcgaagagaagagacacauuguuggaagaagcagcccaugacagcuccccuuccugggacucgcccucauccucuuccugcuccccuuccuggggugcagccuaaaaggaccuauguccucacaccauugaaaccacuaguucuguccccccaggagaccugguugugugugugugagugguugaccuuccuccauccccugguccuucccuucccuucccgaggcacagagagacagggcaggauccacgugcccauuguggaggcagagaaaagagaaaguguuuuauauacgguacuuauuuaauaucccuuuuuaauuagaaauuaaaacaguuaauuuaauuaaagaguaggguuuuuuuucaguauucuugguuaauauuuaauuucaacuauuuaugagauguaucuuuugcucucucuugcucucuuauuuguaccgguuuuuguauauaaaauucauguuuccaaucucucucucccugaucggugacagucacuagcuuaucuugaacagauauuuaauuuugcuaacacucagcucugcccuccccgauccccuggcuccccagcacacauuccuuugaaauaagguuucaauauacaucuacauacuauauauauauuuggcaacuuguauuuguguguauauauauauauauauguuuauguauauaugugauucugauaaaauagacauugcuauucuguuuuuuauauguaaaaacaaaacaagaaaaaauagagaauucuacauacuaaaucucucuccuuuuuuaauuuuaauauuuguuaucauuuauuuauuggugcuacuguuuauccguaauaauuguggggaaaagauauuaacaucacgucuuugucucuagugcaguuuuucgagauauuccguaguacauauuuauuuuuaaacaacgacaaagaaauacagauauaucuuaaaaaaaaaaaagcauuuuguauuaaagaauuuaauucugaucucaaaaaaaaaaaaa

SEQ ID NO: 1138 - RNA, 3507 nt, Homo sapiens
ggcuuggggcagccggguagcucggaggucguggcgcugggggcuagcaccagcgcucugucgggaggcgcagcgguuagguggaccggucagcggacucaccggccagggcgcucggugcuggaauuugauauucauugauccggguuuuaucccucuucuuuuuucuuaaacauuuuuuuuuaaaacuguauuguuucucguuuuaauuuauuuuugcuugccauuccccacuugaaucgggccgacggcuuggggagauugcucuacuuccccaaaucacuguggauuuuggaaaccagcagaaagaggaaagagguagcaagagcuccagagagaagucgaggaagagagagacggggucagagagagcgcgcgggcgugcgagcagcgaaagcgacaggggcaaagugagugaccugcuuuugggggugaccgccggagcgcggcgugagcccucccccuugggaucccgcagcugaccagucgcgcugacggacagacagacagacaccgcccccagccccagcuaccaccuccuccccggccggcggcggacaguggacgcggcggcgagccgcgggcaggggccggagcccgcgcccggaggcgggguggagggggucggggcucgcggcgucgcacugaaacuuuucguccaacuucugggcuguucucgcuucggaggagccgugguccgcgcgggggaagccgagccgagcggagccgcgagaagugcuagcucgggccgggaggagccgcagccggaggagggggaggaggaagaagagaaggaagaggagagggggccgcaguggcgacucggcgcucggaagccgggcucauggacgggugaggcggcggugugcgcagacagugcuccagccgcgcgcgcuccccaggcccuggcccgggccucgggccggggaggaagaguagcucgccgaggcgccgaggagagcgggccgccccacagcccgagccggagagggagcgcgagccgcgccggccccggucgggccuccgaaaccaugaacuuucugcugucuugggugcauuggagccuugccuugcugcucuaccuccaccaugccaaguggucccaggcugcacccauggcagaaggaggagggcagaaucaucacgaaguggugaaguucauggaugucuaucagcgcagcuacugccauccaaucgagacccugguggacaucuuccaggaguacccugaugagaucgaguacaucuucaagccauccugugugccccugaugcgaugcgggggcugcugcaaugacgagggccuggagugugugcccacugaggaguccaacaucaccaugcagauuaugcggaucaaaccucaccaaggccagcacauaggagagaugagcuuccuacagcacaacaaaugugaaugcagaccaaagaaagauagagcaagacaagaaaaucccugugggccuugcucagagcggagaaagcauuuguuuguacaagauccgcagacguguaaauguuccugcaaaaacacagacucgcguugcaagaugugacaagccgaggcggugagccgggcaggaggaaggagccucccucaggguuucgggaaccagaucucucaccaggaaagacugauacagaacgaucgauacagaaaccacgcugccgccaccacaccaucaccaucgacagaacaguccuuaauccagaaaccugaaaugaaggaagaggagacucugcgcagagcacuuuggguccggagggcgagacuccggcggaagcauucccgggcgggugacccagcacggucccucuuggaauuggauucgccauuuuauuuuucuugcugcuaaaucaccgagcccggaagauuagagaguuuuauuucugggauuccuguagacacacccacccacauacauacauuuauauauauauauauuauauauauauaaaaauaaauaucucuauuuuauauauauaaaauauauauauucuuuuuuuaaauuaacagugcuaauguuauuggugucuucacuggauguauuugacugcuguggacuugaguugggaggggaauguucccacucagauccugacagggaagaggaggagaugagagacucuggcaugaucuuuuuuuugucccacuugguggggccaggguccucuccccugcccaggaaugugcaaggccagggcaugggggcaaauaugacccaguuuugggaacaccgacaaacccagcccuggcgcugagccucucuaccccaggucagacggacagaaagacagaucacagguacagggaugaggacaccggcucugaccaggaguuuggggagcuucaggacauugcugugcuuuggggauucccuccacaugcugcacgcgcaucucgcccccaggggcacugccuggaagauucaggagccugggcggccuucgcuuacucucaccugcuucugaguugcccaggagaccacuggcagaugucccggcgaagagaagagacacauuguuggaagaagcagcccaugacagcuccccuuccugggacucgcccucauccucuuccugcuccccuuccuggggugcagccuaaaaggaccuauguccucacaccauugaaaccacuaguucuguccccccaggagaccugguugugugugugugagugguugaccuuccuccauccccugguccuucccuucccuucccgaggcacagagagacagggcaggauccacgugcccauuguggaggcagagaaaagagaaaguguuuuauauacgguacuuauuuaauaucccuuuuuaauuagaaauuaaaacaguuaauuuaauuaaagaguaggguuuuuuuucaguauucuugguuaauauuuaauuucaacuauuuaugagauguaucuuuugcucucucuugcucucuuauuuguaccgguuuuuguauauaaaauucauguuuccaaucucucucucccugaucggugacagucacuagcuuaucuugaacagauauuuaauuuugcuaacacucagcucugcccuccccgauccccuggcuccccagcacacauuccuuugaaauaagguuucaauauacaucuacauacuauauauauauuuggcaacuuguauuuguguguauauauauauauauauguuuauguauauaugugauucugauaaaauagacauugcuauucuguuuuuuauauguaaaaacaaaacaagaaaaaauagagaauucuacauacuaaaucucucuccuuuuuuaauuuuaauauuuguuaucauuuauuuauuggugcuacuguuuauccguaauaauuguggggaaaagauauuaacaucacgucuuugucucuagugcaguuuuucgagauauuccguaguacauauuuauuuuuaaacaacgacaaagaaauacagauauaucuuaaaaaaaaaaaagcauuuuguauuaaagaauuuaauucugaucucaaaaaaaaaaaaa

SEQ ID NO: 1139 - RNA, 3410 nt, Homo sapiens
ggcuuggggcagccggguagcucggaggucguggcgcugggggcuagcaccagcgcucugucgggaggcgcagcgguuagguggaccggucagcggacucaccggccagggcgcucggugcuggaauuugauauucauugauccggguuuuaucccucuucuuuuuucuuaaacauuuuuuuuuaaaacuguauuguuucucguuuuaauuuauuuuugcuugccauuccccacuugaaucgggccgacggcuuggggagauugcucuacuuccccaaaucacuguggauuuuggaaaccagcagaaagaggaaagagguagcaagagcuccagagagaagucgaggaagagagagacggggucagagagagcgcgcgggcgugcgagcagcgaaagcgacaggggcaaagugagugaccugcuuuugggggugaccgccggagcgcggcgugagcccucccccuugggaucccgcagcugaccagucgcgcugacggacagacagacagacaccgcccccagccccagcuaccaccuccuccccggccggcggcggacaguggacgcggcggcgagccgcgggcaggggccggagcccgcgcccggaggcgggguggagggggucggggcucgcggcgucgcacugaaacuuuucguccaacuucugggcuguucucgcuucggaggagccgugguccgcgcgggggaagccgagccgagcggagccgcgagaagugcuagcucgggccgggaggagccgcagccggaggagggggaggaggaagaagagaaggaagaggagagggggccgcaguggcgacucggcgcucggaagccgggcucauggacgggugaggcggcggugugcgcagacagugcuccagccgcgcgcgcuccccaggcccuggcccgggccucgggccggggaggaagaguagcucgccgaggcgccgaggagagcgggccgccccacagcccgagccggagagggagcgcgagccgcgccggccccggucgggccuccgaaaccaugaacuuucugcugucuugggugcauuggagccuugccuugcugcucuaccuccaccaugccaaguggucccaggcugcacccauggcagaaggaggagggcagaaucaucacgaaguggugaaguucauggaugucuaucagcgcagcuacugccauccaaucgagacccugguggacaucuuccaggaguacccugaugagaucgaguacaucuucaagccauccugugugccccugaugcgaugcgggggcugcugcaaugacgagggccuggagugugugcccacugaggaguccaacaucaccaugcagauuaugcggaucaaaccucaccaaggccagcacauaggagagaugagcuuccuacagcacaacaaaugugaaugcagaccaaagaaagauagagcaagacaagaaaaaugugacaagccgaggcggugagccgggcaggaggaaggagccucccucaggguuucgggaaccagaucucucaccaggaaagacugauacagaacgaucgauacagaaaccacgcugccgccaccacaccaucaccaucgacagaacaguccuuaauccagaaaccugaaaugaaggaagaggagacucugcgcagagcacuuuggguccggagggcgagacuccggcggaagcauucccgggcgggugacccagcacggucccucuuggaauuggauucgccauuuuauuuuucuugcugcuaaaucaccgagcccggaagauuagagaguuuuauuucugggauuccuguagacacacccacccacauacauacauuuauauauauauauauuauauauauauaaaaauaaauaucucuauuuuauauauauaaaauauauauauucuuuuuuuaaauuaacagugcuaauguuauuggugucuucacuggauguauuugacugcuguggacuugaguugggaggggaauguucccacucagauccugacagggaagaggaggagaugagagacucuggcaugaucuuuuuuuugucccacuugguggggccaggguccucuccccugcccaggaaugugcaaggccagggcaugggggcaaauaugacccaguuuugggaacaccgacaaacccagcccuggcgcugagccucucuaccccaggucagacggacagaaagacagaucacagguacagggaugaggacaccggcucugaccaggaguuuggggagcuucaggacauugcugugcuuuggggauucccuccacaugcugcacgcgcaucucgcccccaggggcacugccuggaagauucaggagccugggcggccuucgcuuacucucaccugcuucugaguugcccaggagaccacuggcagaugucccggcgaagagaagagacacauuguuggaagaagcagcccaugacagcuccccuuccugggacucgcccucauccucuuccugcuccccuuccuggggugcagccuaaaaggaccuauguccucacaccauugaaaccacuaguucuguccccccaggagaccugguugugugugugugagugguugaccuuccuccauccccugguccuucccuucccuucccgaggcacagagagacagggcaggauccacgugcccauuguggaggcagagaaaagagaaaguguuuuauauacgguacuuauuuaauaucccuuuuuaauuagaaauuaaaacaguuaauuuaauuaaagaguaggguuuuuuuucaguauucuugguuaauauuuaauuucaacuauuuaugagauguaucuuuugcucucucuugcucucuuauuuguaccgguuuuuguauauaaaauucauguuuccaaucucucucucccugaucggugacagucacuagcuuaucuugaacagauauuuaauuuugcuaacacucagcucugcccuccccgauccccuggcuccccagcacacauuccuuugaaauaagguuucaauauacaucuacauacuauauauauauuuggcaacuuguauuuguguguauauauauauauauauguuuauguauauaugugauucugauaaaauagacauugcuauucuguuuuuuauauguaaaaacaaaacaagaaaaaauagagaauucuacauacuaaaucucucuccuuuuuuaauuuuaauauuuguuaucauuuauuuauuggugcuacuguuuauccguaauaauuguggggaaaagauauuaacaucacgucuuugucucuagugcaguuuuucgagauauuccguaguacauauuuauuuuuaaacaacgacaaagaaauacagauauaucuuaaaaaaaaaaaagcauuuuguauuaaagaauuuaauucugaucucaaaaaaaaaaaaa

SEQ ID NO: 1140 - RNA, 3476 nt, Homo sapiens
ggcuuggggcagccggguagcucggaggucguggcgcugggggcuagcaccagcgcucugucgggaggcgcagcgguuagguggaccggucagcggacucaccggccagggcgcucggugcuggaauuugauauucauugauccggguuuuaucccucuucuuuuuucuuaaacauuuuuuuuuaaaacuguauuguuucucguuuuaauuuauuuuugcuugccauuccccacuugaaucgggccgacggcuuggggagauugcucuacuuccccaaaucacuguggauuuuggaaaccagcagaaagaggaaagagguagcaagagcuccagagagaagucgaggaagagagagacggggucagagagagcgcgcgggcgugcgagcagcgaaagcgacaggggcaaagugagugaccugcuuuugggggugaccgccggagcgcggcgugagcccucccccuugggaucccgcagcugaccagucgcgcugacggacagacagacagacaccgcccccagccccagcuaccaccuccuccccggccggcggcggacaguggacgcggcggcgagccgcgggcaggggccggagcccgcgcccggaggcgggguggagggggucggggcucgcggcgucgcacugaaacuuuucguccaacuucugggcuguucucgcuucggaggagccgugguccgcgcgggggaagccgagccgagcggagccgcgagaagugcuagcucgggccgggaggagccgcagccggaggagggggaggaggaagaagagaaggaagaggagagggggccgcaguggcgacucggcgcucggaagccgggcucauggacgggugaggcggcggugugcgcagacagugcuccagccgcgcgcgcuccccaggcccuggcccgggccucgggccggggaggaagaguagcucgccgaggcgccgaggagagcgggccgccccacagcccgagccggagagggagcgcgagccgcgccggccccggucgggccuccgaaaccaugaacuuucugcugucuugggugcauuggagccuugccuugcugcucuaccuccaccaugccaaguggucccaggcugcacccauggcagaaggaggagggcagaaucaucacgaaguggugaaguucauggaugucuaucagcgcagcuacugccauccaaucgagacccugguggacaucuuccaggaguacccugaugagaucgaguacaucuucaagccauccugugugccccugaugcgaugcgggggcugcugcaaugacgagggccuggagugugugcccacugaggaguccaacaucaccaugcagauuaugcggaucaaaccucaccaaggccagcacauaggagagaugagcuuccuacagcacaacaaaugugaaugcagaccaaagaaagauagagcaagacaagaaaaucccugugggccuugcucagagcggagaaagcauuuguuuguacaagauccgcagacguguaaauguuccugcaaaaacacagacucgcguugcaaggcgaggcagcuugaguuaaacgaacguacuugcagaucucucaccaggaaagacugauacagaacgaucgauacagaaaccacgcugccgccaccacaccaucaccaucgacagaacaguccuuaauccagaaaccugaaaugaaggaagaggagacucugcgcagagcacuuuggguccggagggcgagacuccggcggaagcauucccgggcgggugacccagcacggucccucuuggaauuggauucgccauuuuauuuuucuugcugcuaaaucaccgagcccggaagauuagagaguuuuauuucugggauuccuguagacacacccacccacauacauacauuuauauauauauauauuauauauauauaaaaauaaauaucucuauuuuauauauauaaaauauauauauucuuuuuuuaaauuaacagugcuaauguuauuggugucuucacuggauguauuugacugcuguggacuugaguugggaggggaauguucccacucagauccugacagggaagaggaggagaugagagacucuggcaugaucuuuuuuuugucccacuugguggggccaggguccucuccccugcccaggaaugugcaaggccagggcaugggggcaaauaugacccaguuuugggaacaccgacaaacccagcccuggcgcugagccucucuaccccaggucagacggacagaaagacagaucacagguacagggaugaggacaccggcucugaccaggaguuuggggagcuucaggacauugcugugcuuuggggauucccuccacaugcugcacgcgcaucucgcccccaggggcacugccuggaagauucaggagccugggcggccuucgcuuacucucaccugcuucugaguugcccaggagaccacuggcagaugucccggcgaagagaagagacacauuguuggaagaagcagcccaugacagcuccccuuccugggacucgcccucauccucuuccugcuccccuuccuggggugcagccuaaaaggaccuauguccucacaccauugaaaccacuaguucuguccccccaggagaccugguugugugugugugagugguugaccuuccuccauccccugguccuucccuucccuucccgaggcacagagagacagggcaggauccacgugcccauuguggaggcagagaaaagagaaaguguuuuauauacgguacuuauuuaauaucccuuuuuaauuagaaauuaaaacaguuaauuuaauuaaagaguaggguuuuuuuucaguauucuugguuaauauuuaauuucaacuauuuaugagauguaucuuuugcucucucuugcucucuuauuuguaccgguuuuuguauauaaaauucauguuuccaaucucucucucccugaucggugacagucacuagcuuaucuugaacagauauuuaauuuugcuaacacucagcucugcccuccccgauccccuggcuccccagcacacauuccuuugaaauaagguuucaauauacaucuacauacuauauauauauuuggcaacuuguauuuguguguauauauauauauauauguuuauguauauaugugauucugauaaaauagacauugcuauucuguuuuuuauauguaaaaacaaaacaagaaaaaauagagaauucuacauacuaaaucucucuccuuuuuuaauuuuaauauuuguuaucauuuauuuauuggugcuacuguuuauccguaauaauuguggggaaaagauauuaacaucacgucuuugucucuagugcaguuuuucgagauauuccguaguacauauuuauuuuuaaacaacgacaaagaaauacagauauaucuuaaaaaaaaaaaagcauuuuguauuaaagaauuuaauucugaucucaaaaaaaaaaaaa

SEQ ID NO: 1141 - RNA, 19 nt, Artificial Sequence
  Description of Artificial Sequence: Synthetic oligonucleotide
ggcuuggggcagccgggua

SEQ ID NO: 1142 - RNA, 19 nt, Artificial Sequence
  Description of Artificial Sequence: Synthetic oligonucleotide
agcucggaggucguggcgc

SEQ ID NO: 1143 - RNA, 19 nt, Artificial Sequence
  Description of Artificial Sequence: Synthetic oligonucleotide
cugggggcuagcaccagcg

SEQ ID NO: 1144 - RNA, 19 nt, Artificial Sequence
  Description of Artificial Sequence: Synthetic oligonucleotide
gcucugucgggaggcgcag

SEQ ID NO: 1145 - RNA, 19 nt, Artificial Sequence
  Description of Artificial Sequence: Synthetic oligonucleotide
gcgguuagguggaccgguc

SEQ ID NO: 1146 - RNA, 19 nt, Artificial Sequence
  Description of Artificial Sequence: Synthetic oligonucleotide
cagcggacucaccggccag

SEQ ID NO: 1147 - RNA, 19 nt, Artificial Sequence
  Description of Artificial Sequence: Synthetic oligonucleotide
gggcgcucggugcuggaau

SEQ ID NO: 1148 - RNA, 19 nt, Artificial Sequence
  Description of Artificial Sequence: Synthetic oligonucleotide
uuugauauucauugauccg

SEQ ID NO: 1149 - RNA, 19 nt, Artificial Sequence
  Description of Artificial Sequence: Synthetic oligonucleotide
ggguuuuaucccucuucuu

SEQ ID NO: 1150 - RNA, 19 nt, Artificial Sequence
  Description of Artificial Sequence: Synthetic oligonucleotide
uuuuucuuaaacauuuuuu

SEQ ID NO: 1151 - RNA, 19 nt, Artificial Sequence
  Description of Artificial Sequence: Synthetic oligonucleotide
uuuuaaaacuguauuguuu

SEQ ID NO: 1152 - RNA, 19 nt, Artificial Sequence
  Description of Artificial Sequence: Synthetic oligonucleotide
ucucguuuuaauuuauuuu

SEQ ID NO: 1153 - RNA, 19 nt, Artificial Sequence
  Description of Artificial Sequence: Synthetic oligonucleotide
uugcuugccauuccccacu

SEQ ID NO: 1154 - RNA, 19 nt, Artificial Sequence
  Description of Artificial Sequence: Synthetic oligonucleotide
uugaaucgggccgacggcu

SEQ ID NO: 1155 - RNA, 19 nt, Artificial Sequence
  Description of Artificial Sequence: Synthetic oligonucleotide
uuggggagauugcucuacu

SEQ ID NO: 1156 - RNA, 19 nt, Artificial Sequence
  Description of Artificial Sequence: Synthetic oligonucleotide
uuccccaaaucacugugga

SEQ ID NO: 1157 - RNA, 19 nt, Artificial Sequence
  Description of Artificial Sequence: Synthetic oligonucleotide
auuuuggaaaccagcagaa

SEQ ID NO: 1158 - RNA, 19 nt, Artificial Sequence
  Description of Artificial Sequence: Synthetic oligonucleotide
aagaggaaagagguagcaa

SEQ ID NO: 1159 - RNA, 19 nt, Artificial Sequence
  Description of Artificial Sequence: Synthetic oligonucleotide
agagcuccagagagaaguc

SEQ ID NO: 1160 - RNA, 19 nt, Artificial Sequence
  Description of Artificial Sequence: Synthetic oligonucleotide
cgaggaagagagagacggg

SEQ ID NO: 1161 - RNA, 19 nt, Artificial Sequence
  Description of Artificial Sequence: Synthetic oligonucleotide
ggucagagagagcgcgcgg

SEQ ID NO: 1162 - RNA, 19 nt, Artificial Sequence
  Description of Artificial Sequence: Synthetic oligonucleotide
ggcgugcgagcagcgaaag

SEQ ID NO: 1163 - RNA, 19 nt, Artificial Sequence
  Description of Artificial Sequence: Synthetic oligonucleotide
gcgacaggggcaaagugag

SEQ ID NO: 1164 - RNA, 19 nt, Artificial Sequence
  Description of Artificial Sequence: Synthetic oligonucleotide
gugaccugcuuuugggggu

SEQ ID NO: 1165 - RNA, 19 nt, Artificial Sequence
  Description of Artificial Sequence: Synthetic oligonucleotide
ugaccgccggagcgcggcg

SEQ ID NO: 1166 - RNA, 19 nt, Artificial Sequence
  Description of Artificial Sequence: Synthetic oligonucleotide
gugagcccucccccuuggg

SEQ ID NO: 1167 - RNA, 19 nt, Artificial Sequence
  Description of Artificial Sequence: Synthetic oligonucleotide
gaucccgcagcugaccagu

SEQ ID NO: 1168 - RNA, 19 nt, Artificial Sequence
  Description of Artificial Sequence: Synthetic oligonucleotide
ucgcgcugacggacagaca

SEQ ID NO: 1169 - RNA, 19 nt, Artificial Sequence
  Description of Artificial Sequence: Synthetic oligonucleotide
agacagacaccgcccccag

SEQ ID NO: 1170 - RNA, 19 nt, Artificial Sequence
  Description of Artificial Sequence: Synthetic oligonucleotide
gccccagcuaccaccuccu

SEQ ID NO: 1171 - RNA, 19 nt, Artificial Sequence
  Description of Artificial Sequence: Synthetic oligonucleotide
uccccggccggcggcggac

SEQ ID NO: 1172 - RNA, 19 nt, Artificial Sequence
  Description of Artificial Sequence: Synthetic oligonucleotide
caguggacgcggcggcgag

SEQ ID NO: 1173 - RNA, 19 nt, Artificial Sequence
  Description of Artificial Sequence: Synthetic oligonucleotide
gccgcgggcaggggccgga

SEQ ID NO: 1174 - RNA, 19 nt, Artificial Sequence
  Description of Artificial Sequence: Synthetic oligonucleotide
agcccgcgcccggaggcgg

SEQ ID NO: 1175 - RNA, 19 nt, Artificial Sequence
  Description of Artificial Sequence: Synthetic oligonucleotide
ggguggagggggucggggc

SEQ ID NO: 1176 - RNA, 19 nt, Artificial Sequence
  Description of Artificial Sequence: Synthetic oligonucleotide
cucgcggcgucgcacugaa

SEQ ID NO: 1177 - RNA, 19 nt, Artificial Sequence
  Description of Artificial Sequence: Synthetic oligonucleotide
aacuuuucguccaacuucu

SEQ ID NO: 1178 - RNA, 19 nt, Artificial Sequence
  Description of Artificial Sequence: Synthetic oligonucleotide
ugggcuguucucgcuucgg

SEQ ID NO: 1179 - RNA, 19 nt, Artificial Sequence
  Description of Artificial Sequence: Synthetic oligonucleotide
gaggagccgugguccgcgc

SEQ ID NO: 1180 - RNA, 19 nt, Artificial Sequence
  Description of Artificial Sequence: Synthetic oligonucleotide
cgggggaagccgagccgag

SEQ ID NO: 1181 - RNA, 19 nt, Artificial Sequence
  Description of Artificial Sequence: Synthetic oligonucleotide
gcggagccgcgagaagugc

SEQ ID NO: 1182 - RNA, 19 nt, Artificial Sequence
  Description of Artificial Sequence: Synthetic oligonucleotide
cuagcucgggccgggagga

SEQ ID NO: 1183 - RNA, 19 nt, Artificial Sequence
  Description of Artificial Sequence: Synthetic oligonucleotide
agccgcagccggaggaggg

SEQ ID NO: 1184 - RNA, 19 nt, Artificial Sequence
  Description of Artificial Sequence: Synthetic oligonucleotide
gggaggaggaagaagagaa

SEQ ID NO: 1185 - RNA, 19 nt, Artificial Sequence
  Description of Artificial Sequence: Synthetic oligonucleotide
aggaagaggagagggggcc

SEQ ID NO: 1186 - RNA, 19 nt, Artificial Sequence
  Description of Artificial Sequence: Synthetic oligonucleotide
cgcaguggcgacucggcgc

SEQ ID NO: 1187 - RNA, 19 nt, Artificial Sequence
  Description of Artificial Sequence: Synthetic oligonucleotide
cucggaagccgggcucaug

SEQ ID NO: 1188 - RNA, 19 nt, Artificial Sequence
  Description of Artificial Sequence: Synthetic oligonucleotide
ggacgggugaggcggcggu

SEQ ID NO: 1189 - RNA, 19 nt, Artificial Sequence
  Description of Artificial Sequence: Synthetic oligonucleotide
ugugcgcagacagugcucc

SEQ ID NO: 1190 - RNA, 19 nt, Artificial Sequence
  Description of Artificial Sequence: Synthetic oligonucleotide
cagccgcgcgcgcucccca

SEQ ID NO: 1191 - RNA, 19 nt, Artificial Sequence
  Description of Artificial Sequence: Synthetic oligonucleotide
aggcccuggcccgggccuc

SEQ ID NO: 1192 - RNA, 19 nt, Artificial Sequence
  Description of Artificial Sequence: Synthetic oligonucleotide
cgggccggggaggaagagu

SEQ ID NO: 1193 - RNA, 19 nt, Artificial Sequence
  Description of Artificial Sequence: Synthetic oligonucleotide
uagcucgccgaggcgccga

SEQ ID NO: 1194 - RNA, 19 nt, Artificial Sequence
  Description of Artificial Sequence: Synthetic oligonucleotide
aggagagcgggccgcccca

SEQ ID NO: 1195 - RNA, 19 nt, Artificial Sequence
  Description of Artificial Sequence: Synthetic oligonucleotide
acagcccgagccggagagg

SEQ ID NO: 1196 - RNA, 19 nt, Artificial Sequence
  Description of Artificial Sequence: Synthetic oligonucleotide
ggagcgcgagccgcgccgg

SEQ ID NO: 1197 - RNA, 19 nt, Artificial Sequence
  Description of Artificial Sequence: Synthetic oligonucleotide
gccccggucgggccuccga

SEQ ID NO: 1198 - RNA, 19 nt, Artificial Sequence
  Description of Artificial Sequence: Synthetic oligonucleotide
aaaccaugaacuuucugcu

SEQ ID NO: 1199 - RNA, 19 nt, Artificial Sequence
  Description of Artificial Sequence: Synthetic oligonucleotide
ugucuugggugcauuggag

SEQ ID NO: 1200 - RNA, 19 nt, Artificial Sequence
  Description of Artificial Sequence: Synthetic oligonucleotide
gccuugccuugcugcucua

SEQ ID NO: 1201 - RNA, 19 nt, Artificial Sequence
  Description of Artificial Sequence: Synthetic oligonucleotide
accuccaccaugccaagug

SEQ ID NO: 1202 - RNA, 19 nt, Artificial Sequence
  Description of Artificial Sequence: Synthetic oligonucleotide
ggucccaggcugcacccau

SEQ ID NO: 1203 - RNA, 19 nt, Artificial Sequence
  Description of Artificial Sequence: Synthetic oligonucleotide
uggcagaaggaggagggca

SEQ ID NO: 1204 - RNA, 19 nt, Artificial Sequence
  Description of Artificial Sequence: Synthetic oligonucleotide
agaaucaucacgaaguggu

SEQ ID NO: 1205 - RNA, 19 nt, Artificial Sequence
  Description of Artificial Sequence: Synthetic oligonucleotide
ugaaguucauggaugucua

SEQ ID NO: 1206 - RNA, 19 nt, Artificial Sequence
  Description of Artificial Sequence: Synthetic oligonucleotide
aucagcgcagcuacugcca

SEQ ID NO: 1207 - RNA, 19 nt, Artificial Sequence
  Description of Artificial Sequence: Synthetic oligonucleotide
auccaaucgagacccuggu

SEQ ID NO: 1208 - RNA, 19 nt, Artificial Sequence
  Description of Artificial Sequence: Synthetic oligonucleotide
uggacaucuuccaggagua

SEQ ID NO: 1209 - RNA, 19 nt, Artificial Sequence
  Description of Artificial Sequence: Synthetic oligonucleotide
acccugaugagaucgagua

SEQ ID NO: 1210 - RNA, 19 nt, Artificial Sequence
  Description of Artificial Sequence: Synthetic oligonucleotide
acaucuucaagccauccug

SEQ ID NO: 1211 - RNA, 19 nt, Artificial Sequence
  Description of Artificial Sequence: Synthetic oligonucleotide
gugugccccugaugcgaug

SEQ ID NO: 1212 - RNA, 19 nt, Artificial Sequence
  Description of Artificial Sequence: Synthetic oligonucleotide
gcgggggcugcugcaauga

SEQ ID NO: 1213 - RNA, 19 nt, Artificial Sequence
  Description of Artificial Sequence: Synthetic oligonucleotide
acgagggccuggagugugu

SEQ ID NO: 1214 - RNA, 19 nt, Artificial Sequence
  Description of Artificial Sequence: Synthetic oligonucleotide
ugcccacugaggaguccaa

SEQ ID NO: 1215 - RNA, 19 nt, Artificial Sequence
  Description of Artificial Sequence: Synthetic oligonucleotide
acaucaccaugcagauuau

SEQ ID NO: 1216 - RNA, 19 nt, Artificial Sequence
  Description of Artificial Sequence: Synthetic oligonucleotide
ugcggaucaaaccucacca

SEQ ID NO: 1217 - RNA, 19 nt, Artificial Sequence
  Description of Artificial Sequence: Synthetic oligonucleotide
aaggccagcacauaggaga

SEQ ID NO: 1218 - RNA, 19 nt, Artificial Sequence
  Description of Artificial Sequence: Synthetic oligonucleotide
agaugagcuuccuacagca

SEQ ID NO: 1219 - RNA, 19 nt, Artificial Sequence
  Description of Artificial Sequence: Synthetic oligonucleotide
acaacaaaugugaaugcag

SEQ ID NO: 1220 - RNA, 19 nt, Artificial Sequence
  Description of Artificial Sequence: Synthetic oligonucleotide
gaccaaagaaagauagagc

SEQ ID NO: 1221 - RNA, 19 nt, Artificial Sequence
  Description of Artificial Sequence: Synthetic oligonucleotide
caagacaagaaaaaaaauc

SEQ ID NO: 1222 - RNA, 19 nt, Artificial Sequence
  Description of Artificial Sequence: Synthetic oligonucleotide
caguucgaggaaagggaaa

SEQ ID NO: 1223 - RNA, 19 nt, Artificial Sequence
  Description of Artificial Sequence: Synthetic oligonucleotide
aggggcaaaaacgaaagcg

SEQ ID NO: 1224 - RNA, 19 nt, Artificial Sequence
  Description of Artificial Sequence: Synthetic oligonucleotide
gcaagaaaucccgguauaa

SEQ ID NO: 1225 - RNA, 19 nt, Artificial Sequence
  Description of Artificial Sequence: Synthetic oligonucleotide
aguccuggagcguucccug

SEQ ID NO: 1226 - RNA, 19 nt, Artificial Sequence
  Description of Artificial Sequence: Synthetic oligonucleotide
gugggccuugcucagagcg

SEQ ID NO: 1227 - RNA, 19 nt, Artificial Sequence
  Description of Artificial Sequence: Synthetic oligonucleotide
ggagaaagcauuuguuugu

SEQ ID NO: 1228 - RNA, 19 nt, Artificial Sequence
  Description of Artificial Sequence: Synthetic oligonucleotide
uacaagauccgcagacgug

SEQ ID NO: 1229 - RNA, 19 nt, Artificial Sequence
  Description of Artificial Sequence: Synthetic oligonucleotide
guaaauguuccugcaaaaa

SEQ ID NO: 1230 - RNA, 19 nt, Artificial Sequence
  Description of Artificial Sequence: Synthetic oligonucleotide
acacagacucgcguugcaa

SEQ ID NO: 1231 - RNA, 19 nt, Artificial Sequence
  Description of Artificial Sequence: Synthetic oligonucleotide
aggcgaggcagcuugaguu

SEQ ID NO: 1232 - RNA, 19 nt, Artificial Sequence
  Description of Artificial Sequence: Synthetic oligonucleotide
uaaacgaacguacuugcag

SEQ ID NO: 1233 - RNA, 19 nt, Artificial Sequence
  Description of Artificial Sequence: Synthetic oligonucleotide
gaugugacaagccgaggcg

SEQ ID NO: 1234 - RNA, 19 nt, Artificial Sequence
  Description of Artificial Sequence: Synthetic oligonucleotide
ggugagccgggcaggagga

SEQ ID NO: 1235 - RNA, 19 nt, Artificial Sequence
  Description of Artificial Sequence: Synthetic oligonucleotide
aaggagccucccucagggu

SEQ ID NO: 1236 - RNA, 19 nt, Artificial Sequence
  Description of Artificial Sequence: Synthetic oligonucleotide
uuucgggaaccagaucucu

SEQ ID NO: 1237 - RNA, 19 nt, Artificial Sequence
  Description of Artificial Sequence: Synthetic oligonucleotide
ucaccaggaaagacugaua

SEQ ID NO: 1238 - RNA, 19 nt, Artificial Sequence
  Description of Artificial Sequence: Synthetic oligonucleotide
acagaacgaucgauacaga

SEQ ID NO: 1239 - RNA, 19 nt, Artificial Sequence
  Description of Artificial Sequence: Synthetic oligonucleotide
aaaccacgcugccgccacc

SEQ ID NO: 1240 - RNA, 19 nt, Artificial Sequence
  Description of Artificial Sequence: Synthetic oligonucleotide
cacaccaucaccaucgaca

SEQ ID NO: 1241 - RNA, 19 nt, Artificial Sequence
  Description of Artificial Sequence: Synthetic oligonucleotide
agaacaguccuuaauccag

SEQ ID NO: 1242 - RNA, 19 nt, Artificial Sequence
  Description of Artificial Sequence: Synthetic oligonucleotide
gaaaccugaaaugaaggaa

SEQ ID NO: 1243 - RNA, 19 nt, Artificial Sequence
  Description of Artificial Sequence: Synthetic oligonucleotide
agaggagacucugcgcaga

SEQ ID NO: 1244 - RNA, 19 nt, Artificial Sequence
  Description of Artificial Sequence: Synthetic oligonucleotide
agcacuuuggguccggagg

SEQ ID NO: 1245 - RNA, 19 nt, Artificial Sequence
  Description of Artificial Sequence: Synthetic oligonucleotide
ggcgagacuccggcggaag

SEQ ID NO: 1246 - RNA, 19 nt, Artificial Sequence
  Description of Artificial Sequence: Synthetic oligonucleotide
gcauucccgggcgggugac

SEQ ID NO: 1247 - RNA, 19 nt, Artificial Sequence
  Description of Artificial Sequence: Synthetic oligonucleotide
cccagcacggucccucuug

SEQ ID NO: 1248 - RNA, 19 nt, Artificial Sequence
  Description of Artificial Sequence: Synthetic oligonucleotide
ggaauuggauucgccauuu

SEQ ID NO: 1249 - RNA, 19 nt, Artificial Sequence
  Description of Artificial Sequence: Synthetic oligonucleotide
uuauuuuucuugcugcuaa

SEQ ID NO: 1250 - RNA, 19 nt, Artificial Sequence
  Description of Artificial Sequence: Synthetic oligonucleotide
aaucaccgagcccggaaga

SEQ ID NO: 1251 - RNA, 19 nt, Artificial Sequence
  Description of Artificial Sequence: Synthetic oligonucleotide
auuagagaguuuuauuucu

SEQ ID NO: 1252 - RNA, 19 nt, Artificial Sequence
  Description of Artificial Sequence: Synthetic oligonucleotide
ugggauuccuguagacaca

SEQ ID NO: 1253 - RNA, 19 nt, Artificial Sequence
  Description of Artificial Sequence: Synthetic oligonucleotide
acccacccacauacauaca

SEQ ID NO: 1254 - RNA, 19 nt, Artificial Sequence
  Description of Artificial Sequence: Synthetic oligonucleotide
auuuauauauauauauauu

SEQ ID NO: 1255 - RNA, 19 nt, Artificial Sequence
  Description of Artificial Sequence: Synthetic oligonucleotide
uauauauauauaaaaauaa

SEQ ID NO: 1256 - RNA, 19 nt, Artificial Sequence
  Description of Artificial Sequence: Synthetic oligonucleotide
aauaucucuauuuuauaua

SEQ ID NO: 1257 - RNA, 19 nt, Artificial Sequence
  Description of Artificial Sequence: Synthetic oligonucleotide
auauaaaauauauauauuc

SEQ ID NO: 1258 - RNA, 19 nt, Artificial Sequence
  Description of Artificial Sequence: Synthetic oligonucleotide
cuuuuuuuaaauuaacagu

SEQ ID NO: 1259 - RNA, 19 nt, Artificial Sequence
  Description of Artificial Sequence: Synthetic oligonucleotide
ugcuaauguuauugguguc

SEQ ID NO: 1260 - RNA, 19 nt, Artificial Sequence
  Description of Artificial Sequence: Synthetic oligonucleotide
cuucacuggauguauuuga

SEQ ID NO: 1261 - RNA, 19 nt, Artificial Sequence
  Description of Artificial Sequence: Synthetic oligonucleotide
acugcuguggacuugaguu

SEQ ID NO: 1262 - RNA, 19 nt, Artificial Sequence
  Description of Artificial Sequence: Synthetic oligonucleotide
ugggaggggaauguuccca

SEQ ID NO: 1263 - RNA, 19 nt, Artificial Sequence
  Description of Artificial Sequence: Synthetic oligonucleotide
acucagauccugacaggga

SEQ ID NO: 1264 - RNA, 19 nt, Artificial Sequence
  Description of Artificial Sequence: Synthetic oligonucleotide
aagaggaggagaugagaga

SEQ ID NO: 1265 - RNA, 19 nt, Artificial Sequence
  Description of Artificial Sequence: Synthetic oligonucleotide
acucuggcaugaucuuuuu

SEQ ID NO: 1266 - RNA, 19 nt, Artificial Sequence
  Description of Artificial Sequence: Synthetic oligonucleotide
uuuugucccacuugguggg

SEQ ID NO: 1267 - RNA, 19 nt, Artificial Sequence
  Description of Artificial Sequence: Synthetic oligonucleotide
ggccaggguccucuccccu

SEQ ID NO: 1268 - RNA, 19 nt, Artificial Sequence
  Description of Artificial Sequence: Synthetic oligonucleotide
ugcccaggaaugugcaagg

SEQ ID NO: 1269 - RNA, 19 nt, Artificial Sequence
  Description of Artificial Sequence: Synthetic oligonucleotide
gccagggcaugggggcaaa

SEQ ID NO: 1270 - RNA, 19 nt, Artificial Sequence
  Description of Artificial Sequence: Synthetic oligonucleotide
auaugacccaguuuuggga

SEQ ID NO: 1271 - RNA, 19 nt, Artificial Sequence
  Description of Artificial Sequence: Synthetic oligonucleotide
aacaccgacaaacccagcc

SEQ ID NO: 1272 - RNA, 19 nt, Artificial Sequence
  Description of Artificial Sequence: Synthetic oligonucleotide
ccuggcgcugagccucucu

SEQ ID NO: 1273 - RNA, 19 nt, Artificial Sequence
  Description of Artificial Sequence: Synthetic oligonucleotide
uaccccaggucagacggac

SEQ ID NO: 1274 - RNA, 19 nt, Artificial Sequence
  Description of Artificial Sequence: Synthetic oligonucleotide
cagaaagacagaucacagg

SEQ ID NO: 1275 - RNA, 19 nt, Artificial Sequence
  Description of Artificial Sequence: Synthetic oligonucleotide
guacagggaugaggacacc

SEQ ID NO: 1276 - RNA, 19 nt, Artificial Sequence
  Description of Artificial Sequence: Synthetic oligonucleotide
cggcucugaccaggaguuu

SEQ ID NO: 1277 - RNA, 19 nt, Artificial Sequence
  Description of Artificial Sequence: Synthetic oligonucleotide
uggggagcuucaggacauu

SEQ ID NO: 1278 - RNA, 19 nt, Artificial Sequence
  Description of Artificial Sequence: Synthetic oligonucleotide
ugcugugcuuuggggauuc

SEQ ID NO: 1279 - RNA, 19 nt, Artificial Sequence
  Description of Artificial Sequence: Synthetic oligonucleotide
cccuccacaugcugcacgc

SEQ ID NO: 1280 - RNA, 19 nt, Artificial Sequence
  Description of Artificial Sequence: Synthetic oligonucleotide
cgcaucucgcccccagggg

SEQ ID NO: 1281 - RNA, 19 nt, Artificial Sequence
  Description of Artificial Sequence: Synthetic oligonucleotide
gcacugccuggaagauuca

SEQ ID NO: 1282 - RNA, 19 nt, Artificial Sequence
  Description of Artificial Sequence: Synthetic oligonucleotide
aggagccugggcggccuuc

SEQ ID NO: 1283 - RNA, 19 nt, Artificial Sequence
  Description of Artificial Sequence: Synthetic oligonucleotide
cgcuuacucucaccugcuu

SEQ ID NO: 1284 - RNA, 19 nt, Artificial Sequence
  Description of Artificial Sequence: Synthetic oligonucleotide
ucugaguugcccaggagac

SEQ ID NO: 1285 - RNA, 19 nt, Artificial Sequence
  Description of Artificial Sequence: Synthetic oligonucleotide
ccacuggcagaugucccgg

SEQ ID NO: 1286 - RNA, 19 nt, Artificial Sequence
  Description of Artificial Sequence: Synthetic oligonucleotide
gcgaagagaagagacacau

SEQ ID NO: 1287 - RNA, 19 nt, Artificial Sequence
  Description of Artificial Sequence: Synthetic oligonucleotide
uuguuggaagaagcagccc

SEQ ID NO: 1288 - RNA, 19 nt, Artificial Sequence
  Description of Artificial Sequence: Synthetic oligonucleotide
caugacagcuccccuuccu

SEQ ID NO: 1289 - RNA, 19 nt, Artificial Sequence
  Description of Artificial Sequence: Synthetic oligonucleotide
ugggacucgcccucauccu

SEQ ID NO: 1290 - RNA, 19 nt, Artificial Sequence
  Description of Artificial Sequence: Synthetic oligonucleotide
ucuuccugcuccccuuccu

SEQ ID NO: 1291 - RNA, 19 nt, Artificial Sequence
  Description of Artificial Sequence: Synthetic oligonucleotide
uggggugcagccuaaaagg

SEQ ID NO: 1292 - RNA, 19 nt, Artificial Sequence
  Description of Artificial Sequence: Synthetic oligonucleotide
gaccuauguccucacacca

SEQ ID NO: 1293 - RNA, 19 nt, Artificial Sequence
  Description of Artificial Sequence: Synthetic oligonucleotide
auugaaaccacuaguucug

SEQ ID NO: 1294 - RNA, 19 nt, Artificial Sequence
  Description of Artificial Sequence: Synthetic oligonucleotide
guccccccaggagaccugg

SEQ ID NO: 1295 - RNA, 19 nt, Artificial Sequence
  Description of Artificial Sequence: Synthetic oligonucleotide
guugugugugugugagugg

SEQ ID NO: 1296 - RNA, 19 nt, Artificial Sequence
  Description of Artificial Sequence: Synthetic oligonucleotide
guugaccuuccuccauccc

SEQ ID NO: 1297 - RNA, 19 nt, Artificial Sequence
  Description of Artificial Sequence: Synthetic oligonucleotide
ccugguccuucccuucccu

SEQ ID NO: 1298 - RNA, 19 nt, Artificial Sequence
  Description of Artificial Sequence: Synthetic oligonucleotide
uucccgaggcacagagaga

SEQ ID NO: 1299 - RNA, 19 nt, Artificial Sequence
  Description of Artificial Sequence: Synthetic oligonucleotide
acagggcaggauccacgug

SEQ ID NO: 1300 - RNA, 19 nt, Artificial Sequence
  Description of Artificial Sequence: Synthetic oligonucleotide
gcccauuguggaggcagag

SEQ ID NO: 1301 - RNA, 19 nt, Artificial Sequence
  Description of Artificial Sequence: Synthetic oligonucleotide
gaaaagagaaaguguuuua

SEQ ID NO: 1302 - RNA, 19 nt, Artificial Sequence
  Description of Artificial Sequence: Synthetic oligonucleotide
auauacgguacuuauuuaa

SEQ ID NO: 1303 - RNA, 19 nt, Artificial Sequence
  Description of Artificial Sequence: Synthetic oligonucleotide
auaucccuuuuuaauuaga

SEQ ID NO: 1304 - RNA, 19 nt, Artificial Sequence
  Description of Artificial Sequence: Synthetic oligonucleotide
aaauuaaaacaguuaauuu

SEQ ID NO: 1305 - RNA, 19 nt, Artificial Sequence
  Description of Artificial Sequence: Synthetic oligonucleotide
uaauuaaagaguaggguuu

SEQ ID NO: 1306 - RNA, 19 nt, Artificial Sequence
  Description of Artificial Sequence: Synthetic oligonucleotide
uuuuuucaguauucuuggu

SEQ ID NO: 1307 - RNA, 19 nt, Artificial Sequence
  Description of Artificial Sequence: Synthetic oligonucleotide
uuaauauuuaauuucaacu

SEQ ID NO: 1308 - RNA, 19 nt, Artificial Sequence
  Description of Artificial Sequence: Synthetic oligonucleotide
uauuuaugagauguaucuu

SEQ ID NO: 1309 - RNA, 19 nt, Artificial Sequence
  Description of Artificial Sequence: Synthetic oligonucleotide
uuugcucucucuugcucuc

SEQ ID NO: 1310 - RNA, 19 nt, Artificial Sequence
  Description of Artificial Sequence: Synthetic oligonucleotide
cuuauuuguaccgguuuuu

SEQ ID NO: 1311 - RNA, 19 nt, Artificial Sequence
  Description of Artificial Sequence: Synthetic oligonucleotide
uguauauaaaauucauguu

SEQ ID NO: 1312 - RNA, 19 nt, Artificial Sequence
  Description of Artificial Sequence: Synthetic oligonucleotide
uuccaaucucucucucccu

SEQ ID NO: 1313 - RNA, 19 nt, Artificial Sequence
  Description of Artificial Sequence: Synthetic oligonucleotide
ugaucggugacagucacua

SEQ ID NO: 1314 - RNA, 19 nt, Artificial Sequence
  Description of Artificial Sequence: Synthetic oligonucleotide
agcuuaucuugaacagaua

SEQ ID NO: 1315 - RNA, 19 nt, Artificial Sequence
  Description of Artificial Sequence: Synthetic oligonucleotide
auuuaauuuugcuaacacu

SEQ ID NO: 1316 - RNA, 19 nt, Artificial Sequence
  Description of Artificial Sequence: Synthetic oligonucleotide
ucagcucugcccuccccga

SEQ ID NO: 1317 - RNA, 19 nt, Artificial Sequence
  Description of Artificial Sequence: Synthetic oligonucleotide
auccccuggcuccccagca

SEQ ID NO: 1318 - RNA, 19 nt, Artificial Sequence
  Description of Artificial Sequence: Synthetic oligonucleotide
acacauuccuuugaaauaa

SEQ ID NO: 1319 - RNA, 19 nt, Artificial Sequence
  Description of Artificial Sequence: Synthetic oligonucleotide
agguuucaauauacaucua

SEQ ID NO: 1320 - RNA, 19 nt, Artificial Sequence
  Description of Artificial Sequence: Synthetic oligonucleotide
acauacuauauauauauuu

SEQ ID NO: 1321 - RNA, 19 nt, Artificial Sequence
  Description of Artificial Sequence: Synthetic oligonucleotide
uggcaacuuguauuugugu

SEQ ID NO: 1322 - RNA, 19 nt, Artificial Sequence
  Description of Artificial Sequence: Synthetic oligonucleotide
uguauauauauauauauau

SEQ ID NO: 1323 - RNA, 19 nt, Artificial Sequence
  Description of Artificial Sequence: Synthetic oligonucleotide
uguuuauguauauauguga

SEQ ID NO: 1324 - RNA, 19 nt, Artificial Sequence
  Description of Artificial Sequence: Synthetic oligonucleotide
auucugauaaaauagacau

SEQ ID NO: 1325 - RNA, 19 nt, Artificial Sequence
  Description of Artificial Sequence: Synthetic oligonucleotide
uugcuauucuguuuuuuau

SEQ ID NO: 1326 - RNA, 19 nt, Artificial Sequence
  Description of Artificial Sequence: Synthetic oligonucleotide
uauguaaaaacaaaacaag

SEQ ID NO: 1327 - RNA, 19 nt, Artificial Sequence
  Description of Artificial Sequence: Synthetic oligonucleotide
gaaaaaauagagaauucua

SEQ ID NO: 1328 - RNA, 19 nt, Artificial Sequence
  Description of Artificial Sequence: Synthetic oligonucleotide
acauacuaaaucucucucc

SEQ ID NO: 1329 - RNA, 19 nt, Artificial Sequence
  Description of Artificial Sequence: Synthetic oligonucleotide
cuuuuuuaauuuuaauauu

SEQ ID NO: 1330 - RNA, 19 nt, Artificial Sequence
  Description of Artificial Sequence: Synthetic oligonucleotide
uuguuaucauuuauuuauu

SEQ ID NO: 1331 - RNA, 19 nt, Artificial Sequence
  Description of Artificial Sequence: Synthetic oligonucleotide
uggugcuacuguuuauccg

SEQ ID NO: 1332 - RNA, 19 nt, Artificial Sequence
  Description of Artificial Sequence: Synthetic oligonucleotide
guaauaauuguggggaaaa

SEQ ID NO: 1333 - RNA, 19 nt, Artificial Sequence
  Description of Artificial Sequence: Synthetic oligonucleotide
agauauuaacaucacgucu

SEQ ID NO: 1334 - RNA, 19 nt, Artificial Sequence
  Description of Artificial Sequence: Synthetic oligonucleotide
uuugucucuagugcaguuu

SEQ ID NO: 1335 - RNA, 19 nt, Artificial Sequence
  Description of Artificial Sequence: Synthetic oligonucleotide
uuucgagauauuccguagu

SEQ ID NO: 1336 - RNA, 19 nt, Artificial Sequence
  Description of Artificial Sequence: Synthetic oligonucleotide
uacauauuuauuuuuaaac

SEQ ID NO: 1337 - RNA, 19 nt, Artificial Sequence
  Description of Artificial Sequence: Synthetic oligonucleotide
caacgacaaagaaauacag

SEQ ID NO: 1338 - RNA, 19 nt, Artificial Sequence
  Description of Artificial Sequence: Synthetic oligonucleotide
gauauaucuuaaaaaaaaa

SEQ ID NO: 1339 - RNA, 19 nt, Artificial Sequence
  Description of Artificial Sequence: Synthetic oligonucleotide
aaaagcauuuuguauuaaa

SEQ ID NO: 1340 - RNA, 19 nt, Artificial Sequence
  Description of Artificial Sequence: Synthetic oligonucleotide
agaauuuaauucugaucuc

SEQ ID NO: 1341 - RNA, 19 nt, Artificial Sequence
  Description of Artificial Sequence: Synthetic oligonucleotide
gcaagaaaucccgucccug

SEQ ID NO: 1342 - RNA, 19 nt, Artificial Sequence
  Description of Artificial Sequence: Synthetic oligonucleotide
caagacaagaaaaucccug

SEQ ID NO: 1343 - RNA, 19 nt, Artificial Sequence
  Description of Artificial Sequence: Synthetic oligonucleotide
gaucucucaccaggaaaga

SEQ ID NO: 1344 - RNA, 19 nt, Artificial Sequence
  Description of Artificial Sequence: Synthetic oligonucleotide
acugauacagaacgaucga

SEQ ID NO: 1345 - RNA, 19 nt, Artificial Sequence
  Description of Artificial Sequence: Synthetic oligonucleotide
auacagaaaccacgcugcc

SEQ ID NO: 1346 - RNA, 19 nt, Artificial Sequence
  Description of Artificial Sequence: Synthetic oligonucleotide
cgccaccacaccaucacca

SEQ ID NO: 1347 - RNA, 19 nt, Artificial Sequence
  Description of Artificial Sequence: Synthetic oligonucleotide
aucgacagaacaguccuua

SEQ ID NO: 1348 - RNA, 19 nt, Artificial Sequence
  Description of Artificial Sequence: Synthetic oligonucleotide
aauccagaaaccugaaaug

SEQ ID NO: 1349 - RNA, 19 nt, Artificial Sequence
  Description of Artificial Sequence: Synthetic oligonucleotide
gaaggaagaggagacucug

SEQ ID NO: 1350 - RNA, 19 nt, Artificial Sequence
  Description of Artificial Sequence: Synthetic oligonucleotide
gcgcagagcacuuuggguc

SEQ ID NO: 1351 - RNA, 19 nt, Artificial Sequence
  Description of Artificial Sequence: Synthetic oligonucleotide
ccggagggcgagacuccgg

SEQ ID NO: 1352 - RNA, 19 nt, Artificial Sequence
  Description of Artificial Sequence: Synthetic oligonucleotide
gcggaagcauucccgggcg

SEQ ID NO: 1353 - RNA, 19 nt, Artificial Sequence
  Description of Artificial Sequence: Synthetic oligonucleotide
gggugacccagcacggucc

SEQ ID NO: 1354 - RNA, 19 nt, Artificial Sequence
  Description of Artificial Sequence: Synthetic oligonucleotide
ccucuuggaauuggauucg

SEQ ID NO: 1355 - RNA, 19 nt, Artificial Sequence
  Description of Artificial Sequence: Synthetic oligonucleotide
gccauuuuauuuuucuugc

SEQ ID NO: 1356 - RNA, 19 nt, Artificial Sequence
  Description of Artificial Sequence: Synthetic oligonucleotide
cugcuaaaucaccgagccc

SEQ ID NO: 1357 - RNA, 19 nt, Artificial Sequence
  Description of Artificial Sequence: Synthetic oligonucleotide
cggaagauuagagaguuuu

SEQ ID NO: 1358 - RNA, 19 nt, Artificial Sequence
  Description of Artificial Sequence: Synthetic oligonucleotide
uauuucugggauuccugua

SEQ ID NO: 1359 - RNA, 19 nt, Artificial Sequence
  Description of Artificial Sequence: Synthetic oligonucleotide
agacacacccacccacaua

SEQ ID NO: 1360 - RNA, 19 nt, Artificial Sequence
  Description of Artificial Sequence: Synthetic oligonucleotide
acauacauuuauauauaua

SEQ ID NO: 1361 - RNA, 19 nt, Artificial Sequence
  Description of Artificial Sequence: Synthetic oligonucleotide
auauauuauauauauauaa

SEQ ID NO: 1362 - RNA, 19 nt, Artificial Sequence
  Description of Artificial Sequence: Synthetic oligonucleotide
aaaauaaauaucucuauuu

SEQ ID NO: 1363 - RNA, 19 nt, Artificial Sequence
  Description of Artificial Sequence: Synthetic oligonucleotide
uuauauauauaaaauauau

SEQ ID NO: 1364 - RNA, 19 nt, Artificial Sequence
  Description of Artificial Sequence: Synthetic oligonucleotide
uauauucuuuuuuuaaauu

SEQ ID NO: 1365 - RNA, 19 nt, Artificial Sequence
  Description of Artificial Sequence: Synthetic oligonucleotide
uaacagugcuaauguuauu

SEQ ID NO: 1366 - RNA, 19 nt, Artificial Sequence
  Description of Artificial Sequence: Synthetic oligonucleotide
uggugucuucacuggaugu

SEQ ID NO: 1367 - RNA, 19 nt, Artificial Sequence
  Description of Artificial Sequence: Synthetic oligonucleotide
uauuugacugcuguggacu

SEQ ID NO: 1368 - RNA, 19 nt, Artificial Sequence
  Description of Artificial Sequence: Synthetic oligonucleotide
uugaguugggaggggaaug

SEQ ID NO: 1369 - RNA, 19 nt, Artificial Sequence
  Description of Artificial Sequence: Synthetic oligonucleotide
guucccacucagauccuga

SEQ ID NO: 1370 - RNA, 19 nt, Artificial Sequence
  Description of Artificial Sequence: Synthetic oligonucleotide
acagggaagaggaggagau

SEQ ID NO: 1371 - RNA, 19 nt, Artificial Sequence
  Description of Artificial Sequence: Synthetic oligonucleotide
ugagagacucuggcaugau

SEQ ID NO: 1372 - RNA, 19 nt, Artificial Sequence
  Description of Artificial Sequence: Synthetic oligonucleotide
ucuuuuuuuugucccacuu

SEQ ID NO: 1373 - RNA, 19 nt, Artificial Sequence
  Description of Artificial Sequence: Synthetic oligonucleotide
ugguggggccaggguccuc

SEQ ID NO: 1374 - RNA, 19 nt, Artificial Sequence
  Description of Artificial Sequence: Synthetic oligonucleotide
cuccccugcccaggaaugu

SEQ ID NO: 1375 - RNA, 19 nt, Artificial Sequence
  Description of Artificial Sequence: Synthetic oligonucleotide
ugcaaggccagggcauggg

SEQ ID NO: 1376 - RNA, 19 nt, Artificial Sequence
  Description of Artificial Sequence: Synthetic oligonucleotide
gggcaaauaugacccaguu

SEQ ID NO: 1377 - RNA, 19 nt, Artificial Sequence
  Description of Artificial Sequence: Synthetic oligonucleotide
uuugggaacaccgacaaac

SEQ ID NO: 1378 - RNA, 19 nt, Artificial Sequence
  Description of Artificial Sequence: Synthetic oligonucleotide
cccagcccuggcgcugagc

SEQ ID NO: 1379 - RNA, 19 nt, Artificial Sequence
  Description of Artificial Sequence: Synthetic oligonucleotide
ccucucuaccccaggucag

SEQ ID NO: 1380 - RNA, 19 nt, Artificial Sequence
  Description of Artificial Sequence: Synthetic oligonucleotide
gacggacagaaagacagau

SEQ ID NO: 1381 - RNA, 19 nt, Artificial Sequence
  Description of Artificial Sequence: Synthetic oligonucleotide
ucacagguacagggaugag

SEQ ID NO: 1382 - RNA, 19 nt, Artificial Sequence
  Description of Artificial Sequence: Synthetic oligonucleotide
ggacaccggcucugaccag

SEQ ID NO: 1383 - RNA, 19 nt, Artificial Sequence
  Description of Artificial Sequence: Synthetic oligonucleotide
ggaguuuggggagcuucag

SEQ ID NO: 1384 - RNA, 19 nt, Artificial Sequence
  Description of Artificial Sequence: Synthetic oligonucleotide
ggacauugcugugcuuugg

SEQ ID NO: 1385 - RNA, 19 nt, Artificial Sequence
  Description of Artificial Sequence: Synthetic oligonucleotide
gggauucccuccacaugcu

SEQ ID NO: 1386 - RNA, 19 nt, Artificial Sequence
  Description of Artificial Sequence: Synthetic oligonucleotide
ugcacgcgcaucucgcccc

SEQ ID NO: 1387 - RNA, 19 nt, Artificial Sequence
  Description of Artificial Sequence: Synthetic oligonucleotide
ccaggggcacugccuggaa

SEQ ID NO: 1388 - RNA, 19 nt, Artificial Sequence
  Description of Artificial Sequence: Synthetic oligonucleotide
agauucaggagccugggcg

SEQ ID NO: 1389 - RNA, 19 nt, Artificial Sequence
  Description of Artificial Sequence: Synthetic oligonucleotide
ggccuucgcuuacucucac

SEQ ID NO: 1390 - RNA, 19 nt, Artificial Sequence
  Description of Artificial Sequence: Synthetic oligonucleotide
ccugcuucugaguugccca

SEQ ID NO: 1391 - RNA, 19 nt, Artificial Sequence
  Description of Artificial Sequence: Synthetic oligonucleotide
aggagaccacuggcagaug

SEQ ID NO: 1392 - RNA, 19 nt, Artificial Sequence
  Description of Artificial Sequence: Synthetic oligonucleotide
gucccggcgaagagaagag

SEQ ID NO: 1393 - RNA, 19 nt, Artificial Sequence
  Description of Artificial Sequence: Synthetic oligonucleotide
gacacauuguuggaagaag

SEQ ID NO: 1394 - RNA, 19 nt, Artificial Sequence
  Description of Artificial Sequence: Synthetic oligonucleotide
gcagcccaugacagcuccc

SEQ ID NO: 1395 - RNA, 19 nt, Artificial Sequence
  Description of Artificial Sequence: Synthetic oligonucleotide
ccuuccugggacucgcccu

SEQ ID NO: 1396 - RNA, 19 nt, Artificial Sequence
  Description of Artificial Sequence: Synthetic oligonucleotide
ucauccucuuccugcuccc

SEQ ID NO: 1397 - RNA, 19 nt, Artificial Sequence
  Description of Artificial Sequence: Synthetic oligonucleotide
ccuuccuggggugcagccu

SEQ ID NO: 1398 - RNA, 19 nt, Artificial Sequence
  Description of Artificial Sequence: Synthetic oligonucleotide
uaaaaggaccuauguccuc

SEQ ID NO: 1399 - RNA, 19 nt, Artificial Sequence
  Description of Artificial Sequence: Synthetic oligonucleotide
cacaccauugaaaccacua

SEQ ID NO: 1400 - RNA, 19 nt, Artificial Sequence
  Description of Artificial Sequence: Synthetic oligonucleotide
aguucuguccccccaggag

SEQ ID NO: 1401 - RNA, 19 nt, Artificial Sequence
  Description of Artificial Sequence: Synthetic oligonucleotide
gaccugguugugugugugu

SEQ ID NO: 1402 - RNA, 19 nt, Artificial Sequence
  Description of Artificial Sequence: Synthetic oligonucleotide
ugagugguugaccuuccuc

SEQ ID NO: 1403 - RNA, 19 nt, Artificial Sequence
  Description of Artificial Sequence: Synthetic oligonucleotide
ccauccccugguccuuccc

SEQ ID NO: 1404 - RNA, 19 nt, Artificial Sequence
  Description of Artificial Sequence: Synthetic oligonucleotide
cuucccuucccgaggcaca

SEQ ID NO: 1405 - RNA, 19 nt, Artificial Sequence
  Description of Artificial Sequence: Synthetic oligonucleotide
agagagacagggcaggauc

SEQ ID NO: 1406 - RNA, 19 nt, Artificial Sequence
  Description of Artificial Sequence: Synthetic oligonucleotide
ccacgugcccauuguggag

SEQ ID NO: 1407 - RNA, 19 nt, Artificial Sequence
  Description of Artificial Sequence: Synthetic oligonucleotide
ggcagagaaaagagaaagu

SEQ ID NO: 1408 - RNA, 19 nt, Artificial Sequence
  Description of Artificial Sequence: Synthetic oligonucleotide
uguuuuauauacgguacuu

SEQ ID NO: 1409 - RNA, 19 nt, Artificial Sequence
  Description of Artificial Sequence: Synthetic oligonucleotide
uauuuaauaucccuuuuua

SEQ ID NO: 1410 - RNA, 19 nt, Artificial Sequence
  Description of Artificial Sequence: Synthetic oligonucleotide
aauuagaaauuaaaacagu

SEQ ID NO: 1411 - RNA, 19 nt, Artificial Sequence
  Description of Artificial Sequence: Synthetic oligonucleotide
uuaauuuaauuaaagagua

SEQ ID NO: 1412 - RNA, 19 nt, Artificial Sequence
  Description of Artificial Sequence: Synthetic oligonucleotide
aggguuuuuuuucaguauu

SEQ ID NO: 1413 - RNA, 19 nt, Artificial Sequence
  Description of Artificial Sequence: Synthetic oligonucleotide
ucuugguuaauauuuaauu

SEQ ID NO: 1414 - RNA, 19 nt, Artificial Sequence
  Description of Artificial Sequence: Synthetic oligonucleotide
uucaacuauuuaugagaug

SEQ ID NO: 1415 - RNA, 19 nt, Artificial Sequence
  Description of Artificial Sequence: Synthetic oligonucleotide
guaucuuuugcucucucuu

SEQ ID NO: 1416 - RNA, 19 nt, Artificial Sequence
  Description of Artificial Sequence: Synthetic oligonucleotide
ugcucucuuauuuguaccg

SEQ ID NO: 1417 - RNA, 19 nt, Artificial Sequence
  Description of Artificial Sequence: Synthetic oligonucleotide
gguuuuuguauauaaaauu

SEQ ID NO: 1418 - RNA, 19 nt, Artificial Sequence
  Description of Artificial Sequence: Synthetic oligonucleotide
ucauguuuccaaucucucu

SEQ ID NO: 1419 - RNA, 19 nt, Artificial Sequence
  Description of Artificial Sequence: Synthetic oligonucleotide
ucucccugaucggugacag

SEQ ID NO: 1420 - RNA, 19 nt, Artificial Sequence
  Description of Artificial Sequence: Synthetic oligonucleotide
gucacuagcuuaucuugaa

SEQ ID NO: 1421 - RNA, 19 nt, Artificial Sequence
  Description of Artificial Sequence: Synthetic oligonucleotide
acagauauuuaauuuugcu

SEQ ID NO: 1422 - RNA, 19 nt, Artificial Sequence
  Description of Artificial Sequence: Synthetic oligonucleotide
uaacacucagcucugcccu

SEQ ID NO: 1423 - RNA, 19 nt, Artificial Sequence
  Description of Artificial Sequence: Synthetic oligonucleotide
uccccgauccccuggcucc

SEQ ID NO: 1424 - RNA, 19 nt, Artificial Sequence
  Description of Artificial Sequence: Synthetic oligonucleotide
cccagcacacauuccuuug

SEQ ID NO: 1425 - RNA, 19 nt, Artificial Sequence
  Description of Artificial Sequence: Synthetic oligonucleotide
gaaauaagguuucaauaua

SEQ ID NO: 1426 - RNA, 19 nt, Artificial Sequence
  Description of Artificial Sequence: Synthetic oligonucleotide
acaucuacauacuauauau

SEQ ID NO: 1427 - RNA, 19 nt, Artificial Sequence
  Description of Artificial Sequence: Synthetic oligonucleotide
uauauuuggcaacuuguau

SEQ ID NO: 1428 - RNA, 19 nt, Artificial Sequence
  Description of Artificial Sequence: Synthetic oligonucleotide
uuuguguguauauauauau

SEQ ID NO: 1429 - RNA, 19 nt, Artificial Sequence
  Description of Artificial Sequence: Synthetic oligonucleotide
uauauauguuuauguauau

SEQ ID NO: 1430 - RNA, 19 nt, Artificial Sequence
  Description of Artificial Sequence: Synthetic oligonucleotide
uaugugauucugauaaaau

SEQ ID NO: 1431 - RNA, 19 nt, Artificial Sequence
  Description of Artificial Sequence: Synthetic oligonucleotide
uagacauugcuauucuguu

SEQ ID NO: 1432 - RNA, 19 nt, Artificial Sequence
  Description of Artificial Sequence: Synthetic oligonucleotide
uuuuuauauguaaaaacaa

SEQ ID NO: 1433 - RNA, 19 nt, Artificial Sequence
  Description of Artificial Sequence: Synthetic oligonucleotide
aaacaagaaaaaauagaga

SEQ ID NO: 1434 - RNA, 19 nt, Artificial Sequence
  Description of Artificial Sequence: Synthetic oligonucleotide
aauucuacauacuaaaucu

SEQ ID NO: 1435 - RNA, 19 nt, Artificial Sequence
  Description of Artificial Sequence: Synthetic oligonucleotide
ucucuccuuuuuuaauuuu

SEQ ID NO: 1436 - RNA, 19 nt, Artificial Sequence
  Description of Artificial Sequence: Synthetic oligonucleotide
uaauauuuguuaucauuua

SEQ ID NO: 1437 - RNA, 19 nt, Artificial Sequence
  Description of Artificial Sequence: Synthetic oligonucleotide
auuuauuggugcuacuguu

SEQ ID NO: 1438 - RNA, 19 nt, Artificial Sequence
  Description of Artificial Sequence: Synthetic oligonucleotide
uuauccguaauaauugugg

SEQ ID NO: 1439 - RNA, 19 nt, Artificial Sequence
  Description of Artificial Sequence: Synthetic oligonucleotide
gggaaaagauauuaacauc

SEQ ID NO: 1440 - RNA, 19 nt, Artificial Sequence
  Description of Artificial Sequence: Synthetic oligonucleotide
cacgucuuugucucuagug

SEQ ID NO: 1441 - RNA, 19 nt, Artificial Sequence
  Description of Artificial Sequence: Synthetic oligonucleotide
gcaguuuuucgagauauuc

SEQ ID NO: 1442 - RNA, 19 nt, Artificial Sequence
  Description of Artificial Sequence: Synthetic oligonucleotide
ccguaguacauauuuauuu

SEQ ID NO: 1443 - RNA, 19 nt, Artificial Sequence
  Description of Artificial Sequence: Synthetic oligonucleotide
uuuaaacaacgacaaagaa

SEQ ID NO: 1444 - RNA, 19 nt, Artificial Sequence
  Description of Artificial Sequence: Synthetic oligonucleotide
aauacagauauaucuuaaa

SEQ ID NO: 1445 - RNA, 19 nt, Artificial Sequence
  Description of Artificial Sequence: Synthetic oligonucleotide
uauuaaagaauuuaauucu

SEQ ID NO: 1446 - RNA, 19 nt, Artificial Sequence
  Description of Artificial Sequence: Synthetic oligonucleotide
agaugugacaagccgaggc

SEQ ID NO: 1447 - RNA, 19 nt, Artificial Sequence
  Description of Artificial Sequence: Synthetic oligonucleotide
cggugagccgggcaggagg

SEQ ID NO: 1448 - RNA, 19 nt, Artificial Sequence
  Description of Artificial Sequence: Synthetic oligonucleotide
gaaggagccucccucaggg

SEQ ID NO: 1449 - RNA, 19 nt, Artificial Sequence
  Description of Artificial Sequence: Synthetic oligonucleotide
guuucgggaaccagaucuc

SEQ ID NO: 1450 - RNA, 19 nt, Artificial Sequence
  Description of Artificial Sequence: Synthetic oligonucleotide
cucaccaggaaagacugau

SEQ ID NO: 1451 - RNA, 19 nt, Artificial Sequence
  Description of Artificial Sequence: Synthetic oligonucleotide
uacagaacgaucgauacag

SEQ ID NO: 1452 - RNA, 19 nt, Artificial Sequence
  Description of Artificial Sequence: Synthetic oligonucleotide
gaaaccacgcugccgccac

SEQ ID NO: 1453 - RNA, 19 nt, Artificial Sequence
  Description of Artificial Sequence: Synthetic oligonucleotide
ccacaccaucaccaucgac

SEQ ID NO: 1454 - RNA, 19 nt, Artificial Sequence
  Description of Artificial Sequence: Synthetic oligonucleotide
cagaacaguccuuaaucca

SEQ ID NO: 1455 - RNA, 19 nt, Artificial Sequence
  Description of Artificial Sequence: Synthetic oligonucleotide
agaaaccugaaaugaagga

SEQ ID NO: 1456 - RNA, 19 nt, Artificial Sequence
  Description of Artificial Sequence: Synthetic oligonucleotide
aagaggagacucugcgcag

SEQ ID NO: 1457 - RNA, 19 nt, Artificial Sequence
  Description of Artificial Sequence: Synthetic oligonucleotide
gagcacuuuggguccggag

SEQ ID NO: 1458 - RNA, 19 nt, Artificial Sequence
  Description of Artificial Sequence: Synthetic oligonucleotide
gggcgagacuccggcggaa

SEQ ID NO: 1459 - RNA, 19 nt, Artificial Sequence
  Description of Artificial Sequence: Synthetic oligonucleotide
agcauucccgggcggguga

SEQ ID NO: 1460 - RNA, 19 nt, Artificial Sequence
  Description of Artificial Sequence: Synthetic oligonucleotide
acccagcacggucccucuu

SEQ ID NO: 1461 - RNA, 19 nt, Artificial Sequence
  Description of Artificial Sequence: Synthetic oligonucleotide
uggaauuggauucgccauu

SEQ ID NO: 1462 - RNA, 19 nt, Artificial Sequence
  Description of Artificial Sequence: Synthetic oligonucleotide
uuuauuuuucuugcugcua

SEQ ID NO: 1463 - RNA, 19 nt, Artificial Sequence
  Description of Artificial Sequence: Synthetic oligonucleotide
aaaucaccgagcccggaag

SEQ ID NO: 1464 - RNA, 19 nt, Artificial Sequence
  Description of Artificial Sequence: Synthetic oligonucleotide
gauuagagaguuuuauuuc

SEQ ID NO: 1465 - RNA, 19 nt, Artificial Sequence
  Description of Artificial Sequence: Synthetic oligonucleotide
cugggauuccuguagacac

SEQ ID NO: 1466 - RNA, 19 nt, Artificial Sequence
  Description of Artificial Sequence: Synthetic oligonucleotide
cacccacccacauacauac

SEQ ID NO: 1467 - RNA, 19 nt, Artificial Sequence
  Description of Artificial Sequence: Synthetic oligonucleotide
cauuuauauauauauauau

SEQ ID NO: 1468 - RNA, 19 nt, Artificial Sequence
  Description of Artificial Sequence: Synthetic oligonucleotide
uuauauauauauaaaaaua

SEQ ID NO: 1469 - RNA, 19 nt, Artificial Sequence
  Description of Artificial Sequence: Synthetic oligonucleotide
aaauaucucuauuuuauau

SEQ ID NO: 1470 - RNA, 19 nt, Artificial Sequence
  Description of Artificial Sequence: Synthetic oligonucleotide
uauauaaaauauauauauu

SEQ ID NO: 1471 - RNA, 19 nt, Artificial Sequence
  Description of Artificial Sequence: Synthetic oligonucleotide
ucuuuuuuuaaauuaacag

SEQ ID NO: 1472 - RNA, 19 nt, Artificial Sequence
  Description of Artificial Sequence: Synthetic oligonucleotide
gugcuaauguuauuggugu

SEQ ID NO: 1473 - RNA, 19 nt, Artificial Sequence
  Description of Artificial Sequence: Synthetic oligonucleotide
ucuucacuggauguauuug

SEQ ID NO: 1474 - RNA, 19 nt, Artificial Sequence
  Description of Artificial Sequence: Synthetic oligonucleotide
gacugcuguggacuugagu

SEQ ID NO: 1475 - RNA, 19 nt, Artificial Sequence
  Description of Artificial Sequence: Synthetic oligonucleotide
uugggaggggaauguuccc

SEQ ID NO: 1476 - RNA, 19 nt, Artificial Sequence
  Description of Artificial Sequence: Synthetic oligonucleotide
cacucagauccugacaggg

SEQ ID NO: 1477 - RNA, 19 nt, Artificial Sequence
  Description of Artificial Sequence: Synthetic oligonucleotide
gaagaggaggagaugagag

SEQ ID NO: 1478 - RNA, 19 nt, Artificial Sequence
  Description of Artificial Sequence: Synthetic oligonucleotide
gacucuggcaugaucuuuu

SEQ ID NO: 1479 - RNA, 19 nt, Artificial Sequence
  Description of Artificial Sequence: Synthetic oligonucleotide
uuuuugucccacuuggugg

SEQ ID NO: 1480 - RNA, 19 nt, Artificial Sequence
  Description of Artificial Sequence: Synthetic oligonucleotide
gggccaggguccucucccc

SEQ ID NO: 1481 - RNA, 19 nt, Artificial Sequence
  Description of Artificial Sequence: Synthetic oligonucleotide
cugcccaggaaugugcaag

SEQ ID NO: 1482 - RNA, 19 nt, Artificial Sequence
  Description of Artificial Sequence: Synthetic oligonucleotide
ggccagggcaugggggcaa

SEQ ID NO: 1483 - RNA, 19 nt, Artificial Sequence
  Description of Artificial Sequence: Synthetic oligonucleotide
aauaugacccaguuuuggg

SEQ ID NO: 1484 - RNA, 19 nt, Artificial Sequence
  Description of Artificial Sequence: Synthetic oligonucleotide
gaacaccgacaaacccagc

SEQ ID NO: 1485 - RNA, 19 nt, Artificial Sequence
  Description of Artificial Sequence: Synthetic oligonucleotide
cccuggcgcugagccucuc

SEQ ID NO: 1486 - RNA, 19 nt, Artificial Sequence
  Description of Artificial Sequence: Synthetic oligonucleotide
cuaccccaggucagacgga

SEQ ID NO: 1487 - RNA, 19 nt, Artificial Sequence
  Description of Artificial Sequence: Synthetic oligonucleotide
acagaaagacagaucacag

SEQ ID NO: 1488 - RNA, 19 nt, Artificial Sequence
  Description of Artificial Sequence: Synthetic oligonucleotide
gguacagggaugaggacac

SEQ ID NO: 1489 - RNA, 19 nt, Artificial Sequence
  Description of Artificial Sequence: Synthetic oligonucleotide
ccggcucugaccaggaguu

SEQ ID NO: 1490 - RNA, 19 nt, Artificial Sequence
  Description of Artificial Sequence: Synthetic oligonucleotide
uuggggagcuucaggacau

SEQ ID NO: 1491 - RNA, 19 nt, Artificial Sequence
  Description of Artificial Sequence: Synthetic oligonucleotide
uugcugugcuuuggggauu

SEQ ID NO: 1492 - RNA, 19 nt, Artificial Sequence
  Description of Artificial Sequence: Synthetic oligonucleotide
ucccuccacaugcugcacg

SEQ ID NO: 1493 - RNA, 19 nt, Artificial Sequence
  Description of Artificial Sequence: Synthetic oligonucleotide
gcgcaucucgcccccaggg

SEQ ID NO: 1494 - RNA, 19 nt, Artificial Sequence
  Description of Artificial Sequence: Synthetic oligonucleotide
ggcacugccuggaagauuc

SEQ ID NO: 1495 - RNA, 19 nt, Artificial Sequence
  Description of Artificial Sequence: Synthetic oligonucleotide
caggagccugggcggccuu

SEQ ID NO: 1496 - RNA, 19 nt, Artificial Sequence
  Description of Artificial Sequence: Synthetic oligonucleotide
ucgcuuacucucaccugcu

SEQ ID NO: 1497 - RNA, 19 nt, Artificial Sequence
  Description of Artificial Sequence: Synthetic oligonucleotide
uucugaguugcccaggaga

SEQ ID NO: 1498 - RNA, 19 nt, Artificial Sequence
  Description of Artificial Sequence: Synthetic oligonucleotide
accacuggcagaugucccg

SEQ ID NO: 1499 - RNA, 19 nt, Artificial Sequence
  Description of Artificial Sequence: Synthetic oligonucleotide
ggcgaagagaagagacaca

SEQ ID NO: 1500 - RNA, 19 nt, Artificial Sequence
  Description of Artificial Sequence: Synthetic oligonucleotide
auuguuggaagaagcagcc

SEQ ID NO: 1501 - RNA, 19 nt, Artificial Sequence
  Description of Artificial Sequence: Synthetic oligonucleotide
ccaugacagcuccccuucc

SEQ ID NO: 1502 - RNA, 19 nt, Artificial Sequence
  Description of Artificial Sequence: Synthetic oligonucleotide
cugggacucgcccucaucc

SEQ ID NO: 1503 - RNA, 19 nt, Artificial Sequence
  Description of Artificial Sequence: Synthetic oligonucleotide
cucuuccugcuccccuucc

SEQ ID NO: 1504 - RNA, 19 nt, Artificial Sequence
  Description of Artificial Sequence: Synthetic oligonucleotide
cuggggugcagccuaaaag

SEQ ID NO: 1505 - RNA, 19 nt, Artificial Sequence
  Description of Artificial Sequence: Synthetic oligonucleotide
ggaccuauguccucacacc

SEQ ID NO: 1506 - RNA, 19 nt, Artificial Sequence
  Description of Artificial Sequence: Synthetic oligonucleotide
cauugaaaccacuaguucu

SEQ ID NO: 1507 - RNA, 19 nt, Artificial Sequence
  Description of Artificial Sequence: Synthetic oligonucleotide
uguccccccaggagaccug

SEQ ID NO: 1508 - RNA, 19 nt, Artificial Sequence
  Description of Artificial Sequence: Synthetic oligonucleotide
gguugugugugugugagug

SEQ ID NO: 1509 - RNA, 19 nt, Artificial Sequence
  Description of Artificial Sequence: Synthetic oligonucleotide
gguugaccuuccuccaucc

SEQ ID NO: 1510 - RNA, 19 nt, Artificial Sequence
  Description of Artificial Sequence: Synthetic oligonucleotide
cccugguccuucccuuccc

SEQ ID NO: 1511 - RNA, 19 nt, Artificial Sequence
  Description of Artificial Sequence: Synthetic oligonucleotide
cuucccgaggcacagagag

SEQ ID NO: 1512 - RNA, 19 nt, Artificial Sequence
  Description of Artificial Sequence: Synthetic oligonucleotide
gacagggcaggauccacgu

SEQ ID NO: 1513 - RNA, 19 nt, Artificial Sequence
  Description of Artificial Sequence: Synthetic oligonucleotide
ugcccauuguggaggcaga

SEQ ID NO: 1514 - RNA, 19 nt, Artificial Sequence
  Description of Artificial Sequence: Synthetic oligonucleotide
agaaaagagaaaguguuuu

SEQ ID NO: 1515 - RNA, 19 nt, Artificial Sequence
  Description of Artificial Sequence: Synthetic oligonucleotide
uauauacgguacuuauuua

SEQ ID NO: 1516 - RNA, 19 nt, Artificial Sequence
  Description of Artificial Sequence: Synthetic oligonucleotide
aauaucccuuuuuaauuag

SEQ ID NO: 1517 - RNA, 19 nt, Artificial Sequence
  Description of Artificial Sequence: Synthetic oligonucleotide
gaaauuaaaacaguuaauu

SEQ ID NO: 1518 - RNA, 19 nt, Artificial Sequence
  Description of Artificial Sequence: Synthetic oligonucleotide
uuaauuaaagaguaggguu

SEQ ID NO: 1519 - RNA, 19 nt, Artificial Sequence
  Description of Artificial Sequence: Synthetic oligonucleotide
uuuuuuucaguauucuugg

SEQ ID NO: 1520 - RNA, 19 nt, Artificial Sequence
  Description of Artificial Sequence: Synthetic oligonucleotide
guuaauauuuaauuucaac

SEQ ID NO: 1521 - RNA, 19 nt, Artificial Sequence
  Description of Artificial Sequence: Synthetic oligonucleotide
cuauuuaugagauguaucu

SEQ ID NO: 1522 - RNA, 19 nt, Artificial Sequence
  Description of Artificial Sequence: Synthetic oligonucleotide
uuuugcucucucuugcucu

SEQ ID NO: 1523 - RNA, 19 nt, Artificial Sequence
  Description of Artificial Sequence: Synthetic oligonucleotide
ucuuauuuguaccgguuuu

SEQ ID NO: 1524 - RNA, 19 nt, Artificial Sequence
  Description of Artificial Sequence: Synthetic oligonucleotide
uuguauauaaaauucaugu

SEQ ID NO: 1525 - RNA, 19 nt, Artificial Sequence
  Description of Artificial Sequence: Synthetic oligonucleotide
uuuccaaucucucucuccc

SEQ ID NO: 1526 - RNA, 19 nt, Artificial Sequence
  Description of Artificial Sequence: Synthetic oligonucleotide
cugaucggugacagucacu

SEQ ID NO: 1527 - RNA, 19 nt, Artificial Sequence
  Description of Artificial Sequence: Synthetic oligonucleotide
uagcuuaucuugaacagau

SEQ ID NO: 1528 - RNA, 19 nt, Artificial Sequence
  Description of Artificial Sequence: Synthetic oligonucleotide
uauuuaauuuugcuaacac

SEQ ID NO: 1529 - RNA, 19 nt, Artificial Sequence
  Description of Artificial Sequence: Synthetic oligonucleotide
cucagcucugcccuccccg

SEQ ID NO: 1530 - RNA, 19 nt, Artificial Sequence
  Description of Artificial Sequence: Synthetic oligonucleotide
gauccccuggcuccccagc

SEQ ID NO: 1531 - RNA, 19 nt, Artificial Sequence
  Description of Artificial Sequence: Synthetic oligonucleotide
cacacauuccuuugaaaua

SEQ ID NO: 1532 - RNA, 19 nt, Artificial Sequence
  Description of Artificial Sequence: Synthetic oligonucleotide
aagguuucaauauacaucu

SEQ ID NO: 1533 - RNA, 19 nt, Artificial Sequence
  Description of Artificial Sequence: Synthetic oligonucleotide
uacauacuauauauauauu

SEQ ID NO: 1534 - RNA, 19 nt, Artificial Sequence
  Description of Artificial Sequence: Synthetic oligonucleotide
uuggcaacuuguauuugug

SEQ ID NO: 1535 - RNA, 19 nt, Artificial Sequence
  Description of Artificial Sequence: Synthetic oligonucleotide
guguauauauauauauaua

SEQ ID NO: 1536 - RNA, 19 nt, Artificial Sequence
  Description of Artificial Sequence: Synthetic oligonucleotide
auguuuauguauauaugug

SEQ ID NO: 1537 - RNA, 19 nt, Artificial Sequence
  Description of Artificial Sequence: Synthetic oligonucleotide
gauucugauaaaauagaca

SEQ ID NO: 1538 - RNA, 19 nt, Artificial Sequence
  Description of Artificial Sequence: Synthetic oligonucleotide
auugcuauucuguuuuuua

SEQ ID NO: 1539 - RNA, 19 nt, Artificial Sequence
  Description of Artificial Sequence: Synthetic oligonucleotide
auauguaaaaacaaaacaa

SEQ ID NO: 1540 - RNA, 19 nt, Artificial Sequence
  Description of Artificial Sequence: Synthetic oligonucleotide
agaaaaaauagagaauucu

SEQ ID NO: 1541 - RNA, 19 nt, Artificial Sequence
  Description of Artificial Sequence: Synthetic oligonucleotide
uacauacuaaaucucucuc

SEQ ID NO: 1542 - RNA, 19 nt, Artificial Sequence
  Description of Artificial Sequence: Synthetic oligonucleotide
ccuuuuuuaauuuuaauau

SEQ ID NO: 1543 - RNA, 19 nt, Artificial Sequence
  Description of Artificial Sequence: Synthetic oligonucleotide
uuuguuaucauuuauuuau

SEQ ID NO: 1544 - RNA, 19 nt, Artificial Sequence
  Description of Artificial Sequence: Synthetic oligonucleotide
uuggugcuacuguuuaucc

SEQ ID NO: 1545 - RNA, 19 nt, Artificial Sequence
  Description of Artificial Sequence: Synthetic oligonucleotide
cguaauaauuguggggaaa

SEQ ID NO: 1546 - RNA, 19 nt, Artificial Sequence
  Description of Artificial Sequence: Synthetic oligonucleotide
aagauauuaacaucacguc

SEQ ID NO: 1547 - RNA, 19 nt, Artificial Sequence
  Description of Artificial Sequence: Synthetic oligonucleotide
cuuugucucuagugcaguu

SEQ ID NO: 1548 - RNA, 19 nt, Artificial Sequence
  Description of Artificial Sequence: Synthetic oligonucleotide
uuuucgagauauuccguag

SEQ ID NO: 1549 - RNA, 19 nt, Artificial Sequence
  Description of Artificial Sequence: Synthetic oligonucleotide
guacauauuuauuuuuaaa

SEQ ID NO: 1550 - RNA, 19 nt, Artificial Sequence
  Description of Artificial Sequence: Synthetic oligonucleotide
acaacgacaaagaaauaca

SEQ ID NO: 1551 - RNA, 19 nt, Artificial Sequence
  Description of Artificial Sequence: Synthetic oligonucleotide
agauauaucuuaaaaaaaa

SEQ ID NO: 1552 - RNA, 19 nt, Artificial Sequence
  Description of Artificial Sequence: Synthetic oligonucleotide
aaaaagcauuuuguauuaa

SEQ ID NO: 1553 - RNA, 19 nt, Artificial Sequence
  Description of Artificial Sequence: Synthetic oligonucleotide
aagaauuuaauucugaucu

SEQ ID NO: 1554 - RNA, 19 nt, Artificial Sequence
  Description of Artificial Sequence: Synthetic oligonucleotide
aguccuggagcguguacgu

SEQ ID NO: 1555 - RNA, 19 nt, Artificial Sequence
  Description of Artificial Sequence: Synthetic oligonucleotide
uuggugcccgcugcugucu

SEQ ID NO: 1556 - RNA, 19 nt, Artificial Sequence
  Description of Artificial Sequence: Synthetic oligonucleotide
uaaugcccuggagccuccc

SEQ ID NO: 1557 - RNA, 19 nt, Artificial Sequence
  Description of Artificial Sequence: Synthetic oligonucleotide
cuggcccccaucccugugg

SEQ ID NO: 1558 - RNA, 19 nt, Artificial Sequence
  Description of Artificial Sequence: Synthetic oligonucleotide
ggccuugcucagagcggag

SEQ ID NO: 1559 - RNA, 19 nt, Artificial Sequence
  Description of Artificial Sequence: Synthetic oligonucleotide
gaaagcauuuguuuguaca

SEQ ID NO: 1560 - RNA, 19 nt, Artificial Sequence
  Description of Artificial Sequence: Synthetic oligonucleotide
aagauccgcagacguguaa

SEQ ID NO: 1561 - RNA, 19 nt, Artificial Sequence
  Description of Artificial Sequence: Synthetic oligonucleotide
aauguuccugcaaaaacac

SEQ ID NO: 1562 - RNA, 19 nt, Artificial Sequence
  Description of Artificial Sequence: Synthetic oligonucleotide
cagacucgcguugcaaggc

SEQ ID NO: 1563 - RNA, 19 nt, Artificial Sequence
  Description of Artificial Sequence: Synthetic oligonucleotide
cgaggcagcuugaguuaaa

SEQ ID NO: 1564 - RNA, 19 nt, Artificial Sequence
  Description of Artificial Sequence: Synthetic oligonucleotide
acgaacguacuugcagaug

SEQ ID NO: 1565 - RNA, 19 nt, Artificial Sequence
  Description of Artificial Sequence: Synthetic oligonucleotide
gugacaagccgaggcggug

SEQ ID NO: 1566 - RNA, 19 nt, Artificial Sequence
  Description of Artificial Sequence: Synthetic oligonucleotide
gagccgggcaggaggaagg

SEQ ID NO: 1567 - RNA, 19 nt, Artificial Sequence
  Description of Artificial Sequence: Synthetic oligonucleotide
gagccucccucaggguuuc

SEQ ID NO: 1568 - RNA, 19 nt, Artificial Sequence
  Description of Artificial Sequence: Synthetic oligonucleotide
cgggaaccagaucucucac

SEQ ID NO: 1569 - RNA, 19 nt, Artificial Sequence
  Description of Artificial Sequence: Synthetic oligonucleotide
ccaggaaagacugauacag

SEQ ID NO: 1570 - RNA, 19 nt, Artificial Sequence
  Description of Artificial Sequence: Synthetic oligonucleotide
gaacgaucgauacagaaac

SEQ ID NO: 1571 - RNA, 19 nt, Artificial Sequence
  Description of Artificial Sequence: Synthetic oligonucleotide
ccacgcugccgccaccaca

SEQ ID NO: 1572 - RNA, 19 nt, Artificial Sequence
  Description of Artificial Sequence: Synthetic oligonucleotide
accaucaccaucgacagaa

SEQ ID NO: 1573 - RNA, 19 nt, Artificial Sequence
  Description of Artificial Sequence: Synthetic oligonucleotide
acaguccuuaauccagaaa

SEQ ID NO: 1574 - RNA, 19 nt, Artificial Sequence
  Description of Artificial Sequence: Synthetic oligonucleotide
accugaaaugaaggaagag

SEQ ID NO: 1575 - RNA, 19 nt, Artificial Sequence
  Description of Artificial Sequence: Synthetic oligonucleotide
ggagacucugcgcagagca

SEQ ID NO: 1576 - RNA, 19 nt, Artificial Sequence
  Description of Artificial Sequence: Synthetic oligonucleotide
acuuuggguccggagggcg

SEQ ID NO: 1577 - RNA, 19 nt, Artificial Sequence
  Description of Artificial Sequence: Synthetic oligonucleotide
gagacuccggcggaagcau

SEQ ID NO: 1578 - RNA, 19 nt, Artificial Sequence
  Description of Artificial Sequence: Synthetic oligonucleotide
uucccgggcgggugaccca

SEQ ID NO: 1579 - RNA, 19 nt, Artificial Sequence
  Description of Artificial Sequence: Synthetic oligonucleotide
agcacggucccucuuggaa

SEQ ID NO: 1580 - RNA, 19 nt, Artificial Sequence
  Description of Artificial Sequence: Synthetic oligonucleotide
auuggauucgccauuuuau

SEQ ID NO: 1581 - RNA, 19 nt, Artificial Sequence
  Description of Artificial Sequence: Synthetic oligonucleotide
uuuuucuugcugcuaaauc

SEQ ID NO: 1582 - RNA, 19 nt, Artificial Sequence
  Description of Artificial Sequence: Synthetic oligonucleotide
caccgagcccggaagauua

SEQ ID NO: 1583 - RNA, 19 nt, Artificial Sequence
  Description of Artificial Sequence: Synthetic oligonucleotide
agagaguuuuauuucuggg

SEQ ID NO: 1584 - RNA, 19 nt, Artificial Sequence
  Description of Artificial Sequence: Synthetic oligonucleotide
gauuccuguagacacaccc

SEQ ID NO: 1585 - RNA, 19 nt, Artificial Sequence
  Description of Artificial Sequence: Synthetic oligonucleotide
cacccacauacauacauuu

SEQ ID NO: 1586 - RNA, 19 nt, Artificial Sequence
  Description of Artificial Sequence: Synthetic oligonucleotide
uauauauauauauauuaua

SEQ ID NO: 1587 - RNA, 19 nt, Artificial Sequence
  Description of Artificial Sequence: Synthetic oligonucleotide
auauauauaaaaauaaaua

SEQ ID NO: 1588 - RNA, 19 nt, Artificial Sequence
  Description of Artificial Sequence: Synthetic oligonucleotide
aucucuauuuuauauauau

SEQ ID NO: 1589 - RNA, 19 nt, Artificial Sequence
  Description of Artificial Sequence: Synthetic oligonucleotide
uaaaauauauauauucuuu

SEQ ID NO: 1590 - RNA, 19 nt, Artificial Sequence
  Description of Artificial Sequence: Synthetic oligonucleotide
uuuuuaaauuaacagugcu

SEQ ID NO: 1591 - RNA, 19 nt, Artificial Sequence
  Description of Artificial Sequence: Synthetic oligonucleotide
uaauguuauuggugucuuc

SEQ ID NO: 1592 - RNA, 19 nt, Artificial Sequence
  Description of Artificial Sequence: Synthetic oligonucleotide
cacuggauguauuugacug

SEQ ID NO: 1593 - RNA, 19 nt, Artificial Sequence
  Description of Artificial Sequence: Synthetic oligonucleotide
gcuguggacuugaguuggg

SEQ ID NO: 1594 - RNA, 19 nt, Artificial Sequence
  Description of Artificial Sequence: Synthetic oligonucleotide
gaggggaauguucccacuc

SEQ ID NO: 1595 - RNA, 19 nt, Artificial Sequence
  Description of Artificial Sequence: Synthetic oligonucleotide
cagauccugacagggaaga

SEQ ID NO: 1596 - RNA, 19 nt, Artificial Sequence
  Description of Artificial Sequence: Synthetic oligonucleotide
aggaggagaugagagacuc

SEQ ID NO: 1597 - RNA, 19 nt, Artificial Sequence
  Description of Artificial Sequence: Synthetic oligonucleotide
cuggcaugaucuuuuuuuu

SEQ ID NO: 1598 - RNA, 19 nt, Artificial Sequence
  Description of Artificial Sequence: Synthetic oligonucleotide
ugucccacuugguggggcc

SEQ ID NO: 1599 - RNA, 19 nt, Artificial Sequence
  Description of Artificial Sequence: Synthetic oligonucleotide
caggguccucuccccugcc

SEQ ID NO: 1600 - RNA, 19 nt, Artificial Sequence
  Description of Artificial Sequence: Synthetic oligonucleotide
ccaggaaugugcaaggcca

SEQ ID NO: 1601 - RNA, 19 nt, Artificial Sequence
  Description of Artificial Sequence: Synthetic oligonucleotide
agggcaugggggcaaauau

SEQ ID NO: 1602 - RNA, 19 nt, Artificial Sequence
  Description of Artificial Sequence: Synthetic oligonucleotide
ugacccaguuuugggaaca

SEQ ID NO: 1603 - RNA, 19 nt, Artificial Sequence
  Description of Artificial Sequence: Synthetic oligonucleotide
accgacaaacccagcccug

SEQ ID NO: 1604 - RNA, 19 nt, Artificial Sequence
  Description of Artificial Sequence: Synthetic oligonucleotide
ggcgcugagccucucuacc

SEQ ID NO: 1605 - RNA, 19 nt, Artificial Sequence
  Description of Artificial Sequence: Synthetic oligonucleotide
cccaggucagacggacaga

SEQ ID NO: 1606 - RNA, 19 nt, Artificial Sequence
  Description of Artificial Sequence: Synthetic oligonucleotide
aaagacagaucacagguac

SEQ ID NO: 1607 - RNA, 19 nt, Artificial Sequence
  Description of Artificial Sequence: Synthetic oligonucleotide
cagggaugaggacaccggc

SEQ ID NO: 1608 - RNA, 19 nt, Artificial Sequence
  Description of Artificial Sequence: Synthetic oligonucleotide
cucugaccaggaguuuggg

SEQ ID NO: 1609 - RNA, 19 nt, Artificial Sequence
  Description of Artificial Sequence: Synthetic oligonucleotide
ggagcuucaggacauugcu

SEQ ID NO: 1610 - RNA, 19 nt, Artificial Sequence
  Description of Artificial Sequence: Synthetic oligonucleotide
ugugcuuuggggauucccu

SEQ ID NO: 1611 - RNA, 19 nt, Artificial Sequence
  Description of Artificial Sequence: Synthetic oligonucleotide
uccacaugcugcacgcgca

SEQ ID NO: 1612 - RNA, 19 nt, Artificial Sequence
  Description of Artificial Sequence: Synthetic oligonucleotide
aucucgcccccaggggcac

SEQ ID NO: 1613 - RNA, 19 nt, Artificial Sequence
  Description of Artificial Sequence: Synthetic oligonucleotide
cugccuggaagauucagga

SEQ ID NO: 1614 - RNA, 19 nt, Artificial Sequence
  Description of Artificial Sequence: Synthetic oligonucleotide
agccugggcggccuucgcu

SEQ ID NO: 1615 - RNA, 19 nt, Artificial Sequence
  Description of Artificial Sequence: Synthetic oligonucleotide
uuacucucaccugcuucug

SEQ ID NO: 1616 - RNA, 19 nt, Artificial Sequence
  Description of Artificial Sequence: Synthetic oligonucleotide
gaguugcccaggagaccac

SEQ ID NO: 1617 - RNA, 19 nt, Artificial Sequence
  Description of Artificial Sequence: Synthetic oligonucleotide
cuggcagaugucccggcga

SEQ ID NO: 1618 - RNA, 19 nt, Artificial Sequence
  Description of Artificial Sequence: Synthetic oligonucleotide
aagagaagagacacauugu

SEQ ID NO: 1619 - RNA, 19 nt, Artificial Sequence
  Description of Artificial Sequence: Synthetic oligonucleotide
uuggaagaagcagcccaug

SEQ ID NO: 1620 - RNA, 19 nt, Artificial Sequence
  Description of Artificial Sequence: Synthetic oligonucleotide
gacagcuccccuuccuggg

SEQ ID NO: 1621 - RNA, 19 nt, Artificial Sequence
  Description of Artificial Sequence: Synthetic oligonucleotide
gacucgcccucauccucuu

SEQ ID NO: 1622 - RNA, 19 nt, Artificial Sequence
  Description of Artificial Sequence: Synthetic oligonucleotide
uccugcuccccuuccuggg

SEQ ID NO: 1623 - RNA, 19 nt, Artificial Sequence
  Description of Artificial Sequence: Synthetic oligonucleotide
ggugcagccuaaaaggacc

SEQ ID NO: 1624 - RNA, 19 nt, Artificial Sequence
  Description of Artificial Sequence: Synthetic oligonucleotide
cuauguccucacaccauug

SEQ ID NO: 1625 - RNA, 19 nt, Artificial Sequence
  Description of Artificial Sequence: Synthetic oligonucleotide
gaaaccacuaguucugucc

SEQ ID NO: 1626 - RNA, 19 nt, Artificial Sequence
  Description of Artificial Sequence: Synthetic oligonucleotide
cccccaggagaccugguug

SEQ ID NO: 1627 - RNA, 19 nt, Artificial Sequence
  Description of Artificial Sequence: Synthetic oligonucleotide
gugugugugugagugguug

SEQ ID NO: 1628 - RNA, 19 nt, Artificial Sequence
  Description of Artificial Sequence: Synthetic oligonucleotide
gaccuuccuccauccccug

SEQ ID NO: 1629 - RNA, 19 nt, Artificial Sequence
  Description of Artificial Sequence: Synthetic oligonucleotide
gguccuucccuucccuucc

SEQ ID NO: 1630 - RNA, 19 nt, Artificial Sequence
  Description of Artificial Sequence: Synthetic oligonucleotide
ccgaggcacagagagacag

SEQ ID NO: 1631 - RNA, 19 nt, Artificial Sequence
  Description of Artificial Sequence: Synthetic oligonucleotide
gggcaggauccacgugccc

SEQ ID NO: 1632 - RNA, 19 nt, Artificial Sequence
  Description of Artificial Sequence: Synthetic oligonucleotide
cauuguggaggcagagaaa

SEQ ID NO: 1633 - RNA, 19 nt, Artificial Sequence
  Description of Artificial Sequence: Synthetic oligonucleotide
aagagaaaguguuuuauau

SEQ ID NO: 1634 - RNA, 19 nt, Artificial Sequence
  Description of Artificial Sequence: Synthetic oligonucleotide
uacgguacuuauuuaauau

SEQ ID NO: 1635 - RNA, 19 nt, Artificial Sequence
  Description of Artificial Sequence: Synthetic oligonucleotide
ucccuuuuuaauuagaaau

SEQ ID NO: 1636 - RNA, 19 nt, Artificial Sequence
  Description of Artificial Sequence: Synthetic oligonucleotide
uuaaaacaguuaauuuaau

SEQ ID NO: 1637 - RNA, 19 nt, Artificial Sequence
  Description of Artificial Sequence: Synthetic oligonucleotide
uuaaagaguaggguuuuuu

SEQ ID NO: 1638 - RNA, 19 nt, Artificial Sequence
  Description of Artificial Sequence: Synthetic oligonucleotide
uuucaguauucuugguuaa

SEQ ID NO: 1639 - RNA, 19 nt, Artificial Sequence
  Description of Artificial Sequence: Synthetic oligonucleotide
auauuuaauuucaacuauu

SEQ ID NO: 1640 - RNA, 19 nt, Artificial Sequence
  Description of Artificial Sequence: Synthetic oligonucleotide
uuaugagauguaucuuuug

SEQ ID NO: 1641 - RNA, 19 nt, Artificial Sequence
  Description of Artificial Sequence: Synthetic oligonucleotide
gcucucucuugcucucuua

SEQ ID NO: 1642 - RNA, 19 nt, Artificial Sequence
  Description of Artificial Sequence: Synthetic oligonucleotide
auuuguaccgguuuuugua

SEQ ID NO: 1643 - RNA, 19 nt, Artificial Sequence
  Description of Artificial Sequence: Synthetic oligonucleotide
auauaaaauucauguuucc

SEQ ID NO: 1644 - RNA, 19 nt, Artificial Sequence
  Description of Artificial Sequence: Synthetic oligonucleotide
caaucucucucucccugau

SEQ ID NO: 1645 - RNA, 19 nt, Artificial Sequence
  Description of Artificial Sequence: Synthetic oligonucleotide
ucggugacagucacuagcu

SEQ ID NO: 1646 - RNA, 19 nt, Artificial Sequence
  Description of Artificial Sequence: Synthetic oligonucleotide
uuaucuugaacagauauuu

SEQ ID NO: 1647 - RNA, 19 nt, Artificial Sequence
  Description of Artificial Sequence: Synthetic oligonucleotide
uaauuuugcuaacacucag

SEQ ID NO: 1648 - RNA, 19 nt, Artificial Sequence
  Description of Artificial Sequence: Synthetic oligonucleotide
gcucugcccuccccgaucc

SEQ ID NO: 1649 - RNA, 19 nt, Artificial Sequence
  Description of Artificial Sequence: Synthetic oligonucleotide
cccuggcuccccagcacac

SEQ ID NO: 1650 - RNA, 19 nt, Artificial Sequence
  Description of Artificial Sequence: Synthetic oligonucleotide
cauuccuuugaaauaaggu

SEQ ID NO: 1651 - RNA, 19 nt, Artificial Sequence
  Description of Artificial Sequence: Synthetic oligonucleotide
uuucaauauacaucuacau

SEQ ID NO: 1652 - RNA, 19 nt, Artificial Sequence
  Description of Artificial Sequence: Synthetic oligonucleotide
uacuauauauauauuuggc

SEQ ID NO: 1653 - RNA, 19 nt, Artificial Sequence
  Description of Artificial Sequence: Synthetic oligonucleotide
caacuuguauuugugugua

SEQ ID NO: 1654 - RNA, 19 nt, Artificial Sequence
  Description of Artificial Sequence: Synthetic oligonucleotide
auauauauauauauauguu

SEQ ID NO: 1655 - RNA, 19 nt, Artificial Sequence
  Description of Artificial Sequence: Synthetic oligonucleotide
uuauguauauaugugauuc

SEQ ID NO: 1656 - RNA, 19 nt, Artificial Sequence
  Description of Artificial Sequence: Synthetic oligonucleotide
cugauaaaauagacauugc

SEQ ID NO: 1657 - RNA, 19 nt, Artificial Sequence
  Description of Artificial Sequence: Synthetic oligonucleotide
cuauucuguuuuuuauaug

SEQ ID NO: 1658 - RNA, 19 nt, Artificial Sequence
  Description of Artificial Sequence: Synthetic oligonucleotide
guaaaaacaaaacaagaaa

SEQ ID NO: 1659 - RNA, 19 nt, Artificial Sequence
  Description of Artificial Sequence: Synthetic oligonucleotide
aaaauagagaauucuacau

SEQ ID NO: 1660 - RNA, 19 nt, Artificial Sequence
  Description of Artificial Sequence: Synthetic oligonucleotide
uacuaaaucucucuccuuu

SEQ ID NO: 1661 - RNA, 19 nt, Artificial Sequence
  Description of Artificial Sequence: Synthetic oligonucleotide
uuuuaauuuuaauauuugu

SEQ ID NO: 1662 - RNA, 19 nt, Artificial Sequence
  Description of Artificial Sequence: Synthetic oligonucleotide
uuaucauuuauuuauuggu

SEQ ID NO: 1663 - RNA, 19 nt, Artificial Sequence
  Description of Artificial Sequence: Synthetic oligonucleotide
ugcuacuguuuauccguaa

SEQ ID NO: 1664 - RNA, 19 nt, Artificial Sequence
  Description of Artificial Sequence: Synthetic oligonucleotide
auaauuguggggaaaagau

SEQ ID NO: 1665 - RNA, 19 nt, Artificial Sequence
  Description of Artificial Sequence: Synthetic oligonucleotide
uauuaacaucacgucuuug

SEQ ID NO: 1666 - RNA, 19 nt, Artificial Sequence
  Description of Artificial Sequence: Synthetic oligonucleotide
gucucuagugcaguuuuuc

SEQ ID NO: 1667 - RNA, 19 nt, Artificial Sequence
  Description of Artificial Sequence: Synthetic oligonucleotide
cgagauauuccguaguaca

SEQ ID NO: 1668 - RNA, 19 nt, Artificial Sequence
  Description of Artificial Sequence: Synthetic oligonucleotide
auauuuauuuuuaaacaac

SEQ ID NO: 1669 - RNA, 19 nt, Artificial Sequence
  Description of Artificial Sequence: Synthetic oligonucleotide
cgacaaagaaauacagaua

SEQ ID NO: 1670 - RNA, 19 nt, Artificial Sequence
  Description of Artificial Sequence: Synthetic oligonucleotide
agcauuuuguauuaaagaa

SEQ ID NO: 1671 - RNA, 19 nt, Artificial Sequence
  Description of Artificial Sequence: Synthetic oligonucleotide
auuuaauucugaucucaaa

SEQ ID NO: 1672 - RNA, 19 nt, Artificial Sequence
  Description of Artificial Sequence: Synthetic oligonucleotide
caagacaagaaaaauguga

SEQ ID NO: 1673 - RNA, 19 nt, Artificial Sequence
  Description of Artificial Sequence: Synthetic oligonucleotide
acaagccgaggcggugagc

SEQ ID NO: 1674 - RNA, 19 nt, Artificial Sequence
  Description of Artificial Sequence: Synthetic oligonucleotide
ccgggcaggaggaaggagc

SEQ ID NO: 1675 - RNA, 19 nt, Artificial Sequence
  Description of Artificial Sequence: Synthetic oligonucleotide
ccucccucaggguuucggg

SEQ ID NO: 1676 - RNA, 19 nt, Artificial Sequence
  Description of Artificial Sequence: Synthetic oligonucleotide
gaaccagaucucucaccag

SEQ ID NO: 1677 - RNA, 19 nt, Artificial Sequence
  Description of Artificial Sequence: Synthetic oligonucleotide
ggaaagacugauacagaac

SEQ ID NO: 1678 - RNA, 19 nt, Artificial Sequence
  Description of Artificial Sequence: Synthetic oligonucleotide
cgaucgauacagaaaccac

SEQ ID NO: 1679 - RNA, 19 nt, Artificial Sequence
  Description of Artificial Sequence: Synthetic oligonucleotide
cgcugccgccaccacacca

SEQ ID NO: 1680 - RNA, 19 nt, Artificial Sequence
  Description of Artificial Sequence: Synthetic oligonucleotide
aucaccaucgacagaacag

SEQ ID NO: 1681 - RNA, 19 nt, Artificial Sequence
  Description of Artificial Sequence: Synthetic oligonucleotide
guccuuaauccagaaaccu

SEQ ID NO: 1682 - RNA, 19 nt, Artificial Sequence
  Description of Artificial Sequence: Synthetic oligonucleotide
ugaaaugaaggaagaggag

SEQ ID NO: 1683 - RNA, 19 nt, Artificial Sequence
  Description of Artificial Sequence: Synthetic oligonucleotide
gacucugcgcagagcacuu

SEQ ID NO: 1684 - RNA, 19 nt, Artificial Sequence
  Description of Artificial Sequence: Synthetic oligonucleotide
uuggguccggagggcgaga

SEQ ID NO: 1685 - RNA, 19 nt, Artificial Sequence
  Description of Artificial Sequence: Synthetic oligonucleotide
acuccggcggaagcauucc

SEQ ID NO: 1686 - RNA, 19 nt, Artificial Sequence
  Description of Artificial Sequence: Synthetic oligonucleotide
ccgggcgggugacccagca

SEQ ID NO: 1687 - RNA, 19 nt, Artificial Sequence
  Description of Artificial Sequence: Synthetic oligonucleotide
acggucccucuuggaauug

SEQ ID NO: 1688 - RNA, 19 nt, Artificial Sequence
  Description of Artificial Sequence: Synthetic oligonucleotide
ggauucgccauuuuauuuu

SEQ ID NO: 1689 - RNA, 19 nt, Artificial Sequence
  Description of Artificial Sequence: Synthetic oligonucleotide
uucuugcugcuaaaucacc

SEQ ID NO: 1690 - RNA, 19 nt, Artificial Sequence
  Description of Artificial Sequence: Synthetic oligonucleotide
cgagcccggaagauuagag

SEQ ID NO: 1691 - RNA, 19 nt, Artificial Sequence
  Description of Artificial Sequence: Synthetic oligonucleotide
gaguuuuauuucugggauu

SEQ ID NO: 1692 - RNA, 19 nt, Artificial Sequence
  Description of Artificial Sequence: Synthetic oligonucleotide
uccuguagacacacccacc

SEQ ID NO: 1693 - RNA, 19 nt, Artificial Sequence
  Description of Artificial Sequence: Synthetic oligonucleotide
ccacauacauacauuuaua

SEQ ID NO: 1694 - RNA, 19 nt, Artificial Sequence
  Description of Artificial Sequence: Synthetic oligonucleotide
auauauauauauuauauau

SEQ ID NO: 1695 - RNA, 19 nt, Artificial Sequence
  Description of Artificial Sequence: Synthetic oligonucleotide
uauauaaaaauaaauaucu

SEQ ID NO: 1696 - RNA, 19 nt, Artificial Sequence
  Description of Artificial Sequence: Synthetic oligonucleotide
ucuauuuuauauauauaaa

SEQ ID NO: 1697 - RNA, 19 nt, Artificial Sequence
  Description of Artificial Sequence: Synthetic oligonucleotide
aauauauauauucuuuuuu

SEQ ID NO: 1698 - RNA, 19 nt, Artificial Sequence
  Description of Artificial Sequence: Synthetic oligonucleotide
uuaaauuaacagugcuaau

SEQ ID NO: 1699 - RNA, 19 nt, Artificial Sequence
  Description of Artificial Sequence: Synthetic oligonucleotide
uguuauuggugucuucacu

SEQ ID NO: 1700 - RNA, 19 nt, Artificial Sequence
  Description of Artificial Sequence: Synthetic oligonucleotide
uggauguauuugacugcug

SEQ ID NO: 1701 - RNA, 19 nt, Artificial Sequence
  Description of Artificial Sequence: Synthetic oligonucleotide
guggacuugaguugggagg

SEQ ID NO: 1702 - RNA, 19 nt, Artificial Sequence
  Description of Artificial Sequence: Synthetic oligonucleotide
gggaauguucccacucaga

SEQ ID NO: 1703 - RNA, 19 nt, Artificial Sequence
  Description of Artificial Sequence: Synthetic oligonucleotide
auccugacagggaagagga

SEQ ID NO: 1704 - RNA, 19 nt, Artificial Sequence
  Description of Artificial Sequence: Synthetic oligonucleotide
aggagaugagagacucugg

SEQ ID NO: 1705 - RNA, 19 nt, Artificial Sequence
  Description of Artificial Sequence: Synthetic oligonucleotide
gcaugaucuuuuuuuuguc

SEQ ID NO: 1706 - RNA, 19 nt, Artificial Sequence
  Description of Artificial Sequence: Synthetic oligonucleotide
cccacuugguggggccagg

SEQ ID NO: 1707 - RNA, 19 nt, Artificial Sequence
  Description of Artificial Sequence: Synthetic oligonucleotide
gguccucuccccugcccag

SEQ ID NO: 1708 - RNA, 19 nt, Artificial Sequence
  Description of Artificial Sequence: Synthetic oligonucleotide
ggaaugugcaaggccaggg

SEQ ID NO: 1709 - RNA, 19 nt, Artificial Sequence
  Description of Artificial Sequence: Synthetic oligonucleotide
gcaugggggcaaauaugac

SEQ ID NO: 1710 - RNA, 19 nt, Artificial Sequence
  Description of Artificial Sequence: Synthetic oligonucleotide
cccaguuuugggaacaccg

SEQ ID NO: 1711 - RNA, 19 nt, Artificial Sequence
  Description of Artificial Sequence: Synthetic oligonucleotide
gacaaacccagcccuggcg

SEQ ID NO: 1712 - RNA, 19 nt, Artificial Sequence
  Description of Artificial Sequence: Synthetic oligonucleotide
gcugagccucucuacccca

SEQ ID NO: 1713 - RNA, 19 nt, Artificial Sequence
  Description of Artificial Sequence: Synthetic oligonucleotide
aggucagacggacagaaag

SEQ ID NO: 1714 - RNA, 19 nt, Artificial Sequence
  Description of Artificial Sequence: Synthetic oligonucleotide
gacagaucacagguacagg

SEQ ID NO: 1715 - RNA, 19 nt, Artificial Sequence
  Description of Artificial Sequence: Synthetic oligonucleotide
ggaugaggacaccggcucu

SEQ ID NO: 1716 - RNA, 19 nt, Artificial Sequence
  Description of Artificial Sequence: Synthetic oligonucleotide
ugaccaggaguuuggggag

SEQ ID NO: 1717 - RNA, 19 nt, Artificial Sequence
  Description of Artificial Sequence: Synthetic oligonucleotide
gcuucaggacauugcugug

SEQ ID NO: 1718 - RNA, 19 nt, Artificial Sequence
  Description of Artificial Sequence: Synthetic oligonucleotide
gcuuuggggauucccucca

SEQ ID NO: 1719 - RNA, 19 nt, Artificial Sequence
  Description of Artificial Sequence: Synthetic oligonucleotide
acaugcugcacgcgcaucu

SEQ ID NO: 1720 - RNA, 19 nt, Artificial Sequence
  Description of Artificial Sequence: Synthetic oligonucleotide
ucgcccccaggggcacugc

SEQ ID NO: 1721 - RNA, 19 nt, Artificial Sequence
  Description of Artificial Sequence: Synthetic oligonucleotide
ccuggaagauucaggagcc

SEQ ID NO: 1722 - RNA, 19 nt, Artificial Sequence
  Description of Artificial Sequence: Synthetic oligonucleotide
cugggcggccuucgcuuac

SEQ ID NO: 1723 - RNA, 19 nt, Artificial Sequence
  Description of Artificial Sequence: Synthetic oligonucleotide
cucucaccugcuucugagu

SEQ ID NO: 1724 - RNA, 19 nt, Artificial Sequence
  Description of Artificial Sequence: Synthetic oligonucleotide
uugcccaggagaccacugg

SEQ ID NO: 1725 - RNA, 19 nt, Artificial Sequence
  Description of Artificial Sequence: Synthetic oligonucleotide
gcagaugucccggcgaaga

SEQ ID NO: 1726 - RNA, 19 nt, Artificial Sequence
  Description of Artificial Sequence: Synthetic oligonucleotide
agaagagacacauuguugg

SEQ ID NO: 1727 - RNA, 19 nt, Artificial Sequence
  Description of Artificial Sequence: Synthetic oligonucleotide
gaagaagcagcccaugaca

SEQ ID NO: 1728 - RNA, 19 nt, Artificial Sequence
  Description of Artificial Sequence: Synthetic oligonucleotide
agcuccccuuccugggacu

SEQ ID NO: 1729 - RNA, 19 nt, Artificial Sequence
  Description of Artificial Sequence: Synthetic oligonucleotide
ucgcccucauccucuuccu

SEQ ID NO: 1730 - RNA, 19 nt, Artificial Sequence
  Description of Artificial Sequence: Synthetic oligonucleotide
ugcuccccuuccuggggug

SEQ ID NO: 1731 - RNA, 19 nt, Artificial Sequence
  Description of Artificial Sequence: Synthetic oligonucleotide
gcagccuaaaaggaccuau

SEQ ID NO: 1732 - RNA, 19 nt, Artificial Sequence
  Description of Artificial Sequence: Synthetic oligonucleotide
uguccucacaccauugaaa

SEQ ID NO: 1733 - RNA, 19 nt, Artificial Sequence
  Description of Artificial Sequence: Synthetic oligonucleotide
accacuaguucuguccccc

SEQ ID NO: 1734 - RNA, 19 nt, Artificial Sequence
  Description of Artificial Sequence: Synthetic oligonucleotide
ccaggagaccugguugugu

SEQ ID NO: 1735 - RNA, 19 nt, Artificial Sequence
  Description of Artificial Sequence: Synthetic oligonucleotide
ugugugugagugguugacc

SEQ ID NO: 1736 - RNA, 19 nt, Artificial Sequence
  Description of Artificial Sequence: Synthetic oligonucleotide
cuuccuccauccccugguc

SEQ ID NO: 1737 - RNA, 19 nt, Artificial Sequence
  Description of Artificial Sequence: Synthetic oligonucleotide
ccuucccuucccuucccga

SEQ ID NO: 1738 - RNA, 19 nt, Artificial Sequence
  Description of Artificial Sequence: Synthetic oligonucleotide
aggcacagagagacagggc

SEQ ID NO: 1739 - RNA, 19 nt, Artificial Sequence
  Description of Artificial Sequence: Synthetic oligonucleotide
caggauccacgugcccauu

SEQ ID NO: 1740 - RNA, 19 nt, Artificial Sequence
  Description of Artificial Sequence: Synthetic oligonucleotide
uguggaggcagagaaaaga

SEQ ID NO: 1741 - RNA, 19 nt, Artificial Sequence
  Description of Artificial Sequence: Synthetic oligonucleotide
agaaaguguuuuauauacg

SEQ ID NO: 1742 - RNA, 19 nt, Artificial Sequence
  Description of Artificial Sequence: Synthetic oligonucleotide
gguacuuauuuaauauccc

SEQ ID NO: 1743 - RNA, 19 nt, Artificial Sequence
  Description of Artificial Sequence: Synthetic oligonucleotide
cuuuuuaauuagaaauuaa

SEQ ID NO: 1744 - RNA, 19 nt, Artificial Sequence
  Description of Artificial Sequence: Synthetic oligonucleotide
aaacaguuaauuuaauuaa

SEQ ID NO: 1745 - RNA, 19 nt, Artificial Sequence
  Description of Artificial Sequence: Synthetic oligonucleotide
aagaguaggguuuuuuuuc

SEQ ID NO: 1746 - RNA, 19 nt, Artificial Sequence
  Description of Artificial Sequence: Synthetic oligonucleotide
caguauucuugguuaauau

SEQ ID NO: 1747 - RNA, 19 nt, Artificial Sequence
  Description of Artificial Sequence: Synthetic oligonucleotide
uuuaauuucaacuauuuau

SEQ ID NO: 1748 - RNA, 19 nt, Artificial Sequence
  Description of Artificial Sequence: Synthetic oligonucleotide
ugagauguaucuuuugcuc

SEQ ID NO: 1749 - RNA, 19 nt, Artificial Sequence
  Description of Artificial Sequence: Synthetic oligonucleotide
cucucuugcucucuuauuu

SEQ ID NO: 1750 - RNA, 19 nt, Artificial Sequence
  Description of Artificial Sequence: Synthetic oligonucleotide
uguaccgguuuuuguauau

SEQ ID NO: 1751 - RNA, 19 nt, Artificial Sequence
  Description of Artificial Sequence: Synthetic oligonucleotide
uaaaauucauguuuccaau

SEQ ID NO: 1752 - RNA, 19 nt, Artificial Sequence
  Description of Artificial Sequence: Synthetic oligonucleotide
ucucucucucccugaucgg

SEQ ID NO: 1753 - RNA, 19 nt, Artificial Sequence
  Description of Artificial Sequence: Synthetic oligonucleotide
gugacagucacuagcuuau

SEQ ID NO: 1754 - RNA, 19 nt, Artificial Sequence
  Description of Artificial Sequence: Synthetic oligonucleotide
ucuugaacagauauuuaau

SEQ ID NO: 1755 - RNA, 19 nt, Artificial Sequence
  Description of Artificial Sequence: Synthetic oligonucleotide
uuuugcuaacacucagcuc

SEQ ID NO: 1756 - RNA, 19 nt, Artificial Sequence
  Description of Artificial Sequence: Synthetic oligonucleotide
cugcccuccccgauccccu

SEQ ID NO: 1757 - RNA, 19 nt, Artificial Sequence
  Description of Artificial Sequence: Synthetic oligonucleotide
uggcuccccagcacacauu

SEQ ID NO: 1758 - RNA, 19 nt, Artificial Sequence
  Description of Artificial Sequence: Synthetic oligonucleotide
uccuuugaaauaagguuuc

SEQ ID NO: 1759 - RNA, 19 nt, Artificial Sequence
  Description of Artificial Sequence: Synthetic oligonucleotide
caauauacaucuacauacu

SEQ ID NO: 1760 - RNA, 19 nt, Artificial Sequence
  Description of Artificial Sequence: Synthetic oligonucleotide
uauauauauauuuggcaac

SEQ ID NO: 1761 - RNA, 19 nt, Artificial Sequence
  Description of Artificial Sequence: Synthetic oligonucleotide
cuuguauuuguguguauau

SEQ ID NO: 1762 - RNA, 19 nt, Artificial Sequence
  Description of Artificial Sequence: Synthetic oligonucleotide
uauauauauauauguuuau

SEQ ID NO: 1763 - RNA, 19 nt, Artificial Sequence
  Description of Artificial Sequence: Synthetic oligonucleotide
uguauauaugugauucuga

SEQ ID NO: 1764 - RNA, 19 nt, Artificial Sequence
  Description of Artificial Sequence: Synthetic oligonucleotide
auaaaauagacauugcuau

SEQ ID NO: 1765 - RNA, 19 nt, Artificial Sequence
  Description of Artificial Sequence: Synthetic oligonucleotide
uucuguuuuuuauauguaa

SEQ ID NO: 1766 - RNA, 19 nt, Artificial Sequence
  Description of Artificial Sequence: Synthetic oligonucleotide
aaaacaaaacaagaaaaaa

SEQ ID NO: 1767 - RNA, 19 nt, Artificial Sequence
  Description of Artificial Sequence: Synthetic oligonucleotide
auagagaauucuacauacu

SEQ ID NO: 1768 - RNA, 19 nt, Artificial Sequence
  Description of Artificial Sequence: Synthetic oligonucleotide
uaaaucucucuccuuuuuu

SEQ ID NO: 1769 - RNA, 19 nt, Artificial Sequence
  Description of Artificial Sequence: Synthetic oligonucleotide
uaauuuuaauauuuguuau

SEQ ID NO: 1770 - RNA, 19 nt, Artificial Sequence
  Description of Artificial Sequence: Synthetic oligonucleotide
ucauuuauuuauuggugcu

SEQ ID NO: 1771 - RNA, 19 nt, Artificial Sequence
  Description of Artificial Sequence: Synthetic oligonucleotide
uacuguuuauccguaauaa

SEQ ID NO: 1772 - RNA, 19 nt, Artificial Sequence
  Description of Artificial Sequence: Synthetic oligonucleotide
auuguggggaaaagauauu

SEQ ID NO: 1773 - RNA, 19 nt, Artificial Sequence
  Description of Artificial Sequence: Synthetic oligonucleotide
uaacaucacgucuuugucu

SEQ ID NO: 1774 - RNA, 19 nt, Artificial Sequence
  Description of Artificial Sequence: Synthetic oligonucleotide
ucuagugcaguuuuucgag

SEQ ID NO: 1775 - RNA, 19 nt, Artificial Sequence
  Description of Artificial Sequence: Synthetic oligonucleotide
gauauuccguaguacauau

SEQ ID NO: 1776 - RNA, 19 nt, Artificial Sequence
  Description of Artificial Sequence: Synthetic oligonucleotide
uuuauuuuuaaacaacgac

SEQ ID NO: 1777 - RNA, 19 nt, Artificial Sequence
  Description of Artificial Sequence: Synthetic oligonucleotide
caaagaaauacagauauau

SEQ ID NO: 1778 - RNA, 19 nt, Artificial Sequence
  Description of Artificial Sequence: Synthetic oligonucleotide
auuuuguauuaaagaauuu

SEQ ID NO: 1779 - RNA, 19 nt, Artificial Sequence
  Description of Artificial Sequence: Synthetic oligonucleotide
uaauucugaucucaaaaaa

SEQ ID NO: 1780 - RNA, 25 nt, Artificial Sequence
  Description of Artificial Sequence: Synthetic oligonucleotide
ggcuuggggcagccggguagcucgg

SEQ ID NO: 1781 - RNA, 25 nt, Artificial Sequence
  Description of Artificial Sequence: Synthetic oligonucleotide
gaggucguggcgcugggggcuagca

SEQ ID NO: 1782 - RNA, 25 nt, Artificial Sequence
  Description of Artificial Sequence: Synthetic oligonucleotide
accagcgcucugucgggaggcgcag

SEQ ID NO: 1783 - RNA, 25 nt, Artificial Sequence
  Description of Artificial Sequence: Synthetic oligonucleotide
gcgguuagguggaccggucagcgga

SEQ ID NO: 1784 - RNA, 25 nt, Artificial Sequence
  Description of Artificial Sequence: Synthetic oligonucleotide
acucaccggccagggcgcucggugc

SEQ ID NO: 1785 - RNA, 25 nt, Artificial Sequence
  Description of Artificial Sequence: Synthetic oligonucleotide
cuggaauuugauauucauugauccg

SEQ ID NO: 1786 - RNA, 25 nt, Artificial Sequence
  Description of Artificial Sequence: Synthetic oligonucleotide
ggguuuuaucccucuucuuuuuucu

SEQ ID NO: 1787 - RNA, 25 nt, Artificial Sequence
  Description of Artificial Sequence: Synthetic oligonucleotide
uuaaacauuuuuuuuuaaaacugua

SEQ ID NO: 1788 - RNA, 25 nt, Artificial Sequence
  Description of Artificial Sequence: Synthetic oligonucleotide
auuguuucucguuuuaauuuauuuu

SEQ ID NO: 1789 - RNA, 25 nt, Artificial Sequence
  Description of Artificial Sequence: Synthetic oligonucleotide
uugcuugccauuccccacuugaauc

SEQ ID NO: 1790 - RNA, 25 nt, Artificial Sequence
  Description of Artificial Sequence: Synthetic oligonucleotide
cgggccgacggcuuggggagauugc

SEQ ID NO: 1791 - RNA, 25 nt, Artificial Sequence
  Description of Artificial Sequence: Synthetic oligonucleotide
cucuacuuccccaaaucacugugga

SEQ ID NO: 1792 - RNA, 25 nt, Artificial Sequence
  Description of Artificial Sequence: Synthetic oligonucleotide
auuuuggaaaccagcagaaagagga

SEQ ID NO: 1793 - RNA, 25 nt, Artificial Sequence
  Description of Artificial Sequence: Synthetic oligonucleotide
aaagagguagcaagagcuccagaga

SEQ ID NO: 1794 - RNA, 25 nt, Artificial Sequence
  Description of Artificial Sequence: Synthetic oligonucleotide
agaagucgaggaagagagagacggg

SEQ ID NO: 1795 - RNA, 25 nt, Artificial Sequence
  Description of Artificial Sequence: Synthetic oligonucleotide
ggucagagagagcgcgcgggcgugc

SEQ ID NO: 1796 - RNA, 25 nt, Artificial Sequence
  Description of Artificial Sequence: Synthetic oligonucleotide
cgagcagcgaaagcgacaggggcaa

SEQ ID NO: 1797 - RNA, 25 nt, Artificial Sequence
  Description of Artificial Sequence: Synthetic oligonucleotide
aagugagugaccugcuuuugggggu

SEQ ID NO: 1798 - RNA, 25 nt, Artificial Sequence
  Description of Artificial Sequence: Synthetic oligonucleotide
ugaccgccggagcgcggcgugagcc

SEQ ID NO: 1799 - RNA, 25 nt, Artificial Sequence
  Description of Artificial Sequence: Synthetic oligonucleotide
ccucccccuugggaucccgcagcug

SEQ ID NO: 1800 - RNA, 25 nt, Artificial Sequence
  Description of Artificial Sequence: Synthetic oligonucleotide
gaccagucgcgcugacggacagaca

SEQ ID NO: 1801 - RNA, 25 nt, Artificial Sequence
  Description of Artificial Sequence: Synthetic oligonucleotide
agacagacaccgcccccagccccag

SEQ ID NO: 1802 - RNA, 25 nt, Artificial Sequence
  Description of Artificial Sequence: Synthetic oligonucleotide
gcuaccaccuccuccccggccggcg

SEQ ID NO: 1803 - RNA, 25 nt, Artificial Sequence
  Description of Artificial Sequence: Synthetic oligonucleotide
ggcggacaguggacgcggcggcgag

SEQ ID NO: 1804 - RNA, 25 nt, Artificial Sequence
  Description of Artificial Sequence: Synthetic oligonucleotide
gccgcgggcaggggccggagcccgc

SEQ ID NO: 1805 - RNA, 25 nt, Artificial Sequence
  Description of Artificial Sequence: Synthetic oligonucleotide
cgcccggaggcgggguggagggggu

SEQ ID NO: 1806 - RNA, 25 nt, Artificial Sequence
  Description of Artificial Sequence: Synthetic oligonucleotide
ucggggcucgcggcgucgcacugaa

SEQ ID NO: 1807 - RNA, 25 nt, Artificial Sequence
  Description of Artificial Sequence: Synthetic oligonucleotide
aacuuuucguccaacuucugggcug

SEQ ID NO: 1808 - RNA, 25 nt, Artificial Sequence
  Description of Artificial Sequence: Synthetic oligonucleotide
guucucgcuucggaggagccguggu

SEQ ID NO: 1809 - RNA, 25 nt, Artificial Sequence
  Description of Artificial Sequence: Synthetic oligonucleotide
uccgcgcgggggaagccgagccgag

SEQ ID NO: 1810 - RNA, 25 nt, Artificial Sequence
  Description of Artificial Sequence: Synthetic oligonucleotide
gcggagccgcgagaagugcuagcuc

SEQ ID NO: 1811 - RNA, 25 nt, Artificial Sequence
  Description of Artificial Sequence: Synthetic oligonucleotide
cgggccgggaggagccgcagccgga

SEQ ID NO: 1812 - RNA, 25 nt, Artificial Sequence
  Description of Artificial Sequence: Synthetic oligonucleotide
aggagggggaggaggaagaagagaa

SEQ ID NO: 1813 - RNA, 25 nt, Artificial Sequence
  Description of Artificial Sequence: Synthetic oligonucleotide
aggaagaggagagggggccgcagug

SEQ ID NO: 1814 - RNA, 25 nt, Artificial Sequence
  Description of Artificial Sequence: Synthetic oligonucleotide
ggcgacucggcgcucggaagccggg

SEQ ID NO: 1815 - RNA, 25 nt, Artificial Sequence
  Description of Artificial Sequence: Synthetic oligonucleotide
gcucauggacgggugaggcggcggu

SEQ ID NO: 1816 - RNA, 25 nt, Artificial Sequence
  Description of Artificial Sequence: Synthetic oligonucleotide
ugugcgcagacagugcuccagccgc

SEQ ID NO: 1817 - RNA, 25 nt, Artificial Sequence
  Description of Artificial Sequence: Synthetic oligonucleotide
cgcgcgcuccccaggcccuggcccg

SEQ ID NO: 1818 - RNA, 25 nt, Artificial Sequence
  Description of Artificial Sequence: Synthetic oligonucleotide
gggccucgggccggggaggaagagu

SEQ ID NO: 1819 - RNA, 25 nt, Artificial Sequence
  Description of Artificial Sequence: Synthetic oligonucleotide
uagcucgccgaggcgccgaggagag

SEQ ID NO: 1820 - RNA, 25 nt, Artificial Sequence
  Description of Artificial Sequence: Synthetic oligonucleotide
gcgggccgccccacagcccgagccg

SEQ ID NO: 1821 - RNA, 25 nt, Artificial Sequence
  Description of Artificial Sequence: Synthetic oligonucleotide
ggagagggagcgcgagccgcgccgg

SEQ ID NO: 1822 - RNA, 25 nt, Artificial Sequence
  Description of Artificial Sequence: Synthetic oligonucleotide
gccccggucgggccuccgaaaccau

SEQ ID NO: 1823 - RNA, 25 nt, Artificial Sequence
  Description of Artificial Sequence: Synthetic oligonucleotide
ugaacuuucugcugucuugggugca

SEQ ID NO: 1824 - RNA, 25 nt, Artificial Sequence
  Description of Artificial Sequence: Synthetic oligonucleotide
auuggagccuugccuugcugcucua

SEQ ID NO: 1825 - RNA, 25 nt, Artificial Sequence
  Description of Artificial Sequence: Synthetic oligonucleotide
accuccaccaugccaagugguccca

SEQ ID NO: 1826 - RNA, 25 nt, Artificial Sequence
  Description of Artificial Sequence: Synthetic oligonucleotide
aggcugcacccauggcagaaggagg

SEQ ID NO: 1827 - RNA, 25 nt, Artificial Sequence
  Description of Artificial Sequence: Synthetic oligonucleotide
gagggcagaaucaucacgaaguggu

SEQ ID NO: 1828 - RNA, 25 nt, Artificial Sequence
  Description of Artificial Sequence: Synthetic oligonucleotide
ugaaguucauggaugucuaucagcg

SEQ ID NO: 1829 - RNA, 25 nt, Artificial Sequence
  Description of Artificial Sequence: Synthetic oligonucleotide
gcagcuacugccauccaaucgagac

SEQ ID NO: 1830 - RNA, 25 nt, Artificial Sequence
  Description of Artificial Sequence: Synthetic oligonucleotide
cccugguggacaucuuccaggagua

SEQ ID NO: 1831 - RNA, 25 nt, Artificial Sequence
  Description of Artificial Sequence: Synthetic oligonucleotide
acccugaugagaucgaguacaucuu

SEQ ID NO: 1832 - RNA, 25 nt, Artificial Sequence
  Description of Artificial Sequence: Synthetic oligonucleotide
ucaagccauccugugugccccugau

SEQ ID NO: 1833 - RNA, 25 nt, Artificial Sequence
  Description of Artificial Sequence: Synthetic oligonucleotide
ugcgaugcgggggcugcugcaauga

SEQ ID NO: 1834 - RNA, 25 nt, Artificial Sequence
  Description of Artificial Sequence: Synthetic oligonucleotide
acgagggccuggagugugugcccac

SEQ ID NO: 1835 - RNA, 25 nt, Artificial Sequence
  Description of Artificial Sequence: Synthetic oligonucleotide
cugaggaguccaacaucaccaugca

SEQ ID NO: 1836 - RNA, 25 nt, Artificial Sequence
  Description of Artificial Sequence: Synthetic oligonucleotide
agauuaugcggaucaaaccucacca

SEQ ID NO: 1837 - RNA, 25 nt, Artificial Sequence
  Description of Artificial Sequence: Synthetic oligonucleotide
aaggccagcacauaggagagaugag

SEQ ID NO: 1838 - RNA, 25 nt, Artificial Sequence
  Description of Artificial Sequence: Synthetic oligonucleotide
gcuuccuacagcacaacaaauguga

SEQ ID NO: 1839 - RNA, 25 nt, Artificial Sequence
  Description of Artificial Sequence: Synthetic oligonucleotide
aaugcagaccaaagaaagauagagc

SEQ ID NO: 1840 - RNA, 25 nt, Artificial Sequence
  Description of Artificial Sequence: Synthetic oligonucleotide
caagacaagaaaaaaaaucaguucg

SEQ ID NO: 1841 - RNA, 25 nt, Artificial Sequence
  Description of Artificial Sequence: Synthetic oligonucleotide
gaggaaagggaaaggggcaaaaacg

SEQ ID NO: 1842 - RNA, 25 nt, Artificial Sequence
  Description of Artificial Sequence: Synthetic oligonucleotide
gaaagcgcaagaaaucccgguauaa

SEQ ID NO: 1843 - RNA, 25 nt, Artificial Sequence
  Description of Artificial Sequence: Synthetic oligonucleotide
aguccuggagcguucccugugggcc

SEQ ID NO: 1844 - RNA, 25 nt, Artificial Sequence
  Description of Artificial Sequence: Synthetic oligonucleotide
cuugcucagagcggagaaagcauuu

SEQ ID NO: 1845 - RNA, 25 nt, Artificial Sequence
  Description of Artificial Sequence: Synthetic oligonucleotide
uguuuguacaagauccgcagacgug

SEQ ID NO: 1846 - RNA, 25 nt, Artificial Sequence
  Description of Artificial Sequence: Synthetic oligonucleotide
guaaauguuccugcaaaaacacaga

SEQ ID NO: 1847 - RNA, 25 nt, Artificial Sequence
  Description of Artificial Sequence: Synthetic oligonucleotide
acucgcguugcaaggcgaggcagcu

SEQ ID NO: 1848 - RNA, 25 nt, Artificial Sequence
  Description of Artificial Sequence: Synthetic oligonucleotide
uugaguuaaacgaacguacuugcag

SEQ ID NO: 1849 - RNA, 25 nt, Artificial Sequence
  Description of Artificial Sequence: Synthetic oligonucleotide
gaugugacaagccgaggcggugagc

SEQ ID NO: 1850 - RNA, 25 nt, Artificial Sequence
  Description of Artificial Sequence: Synthetic oligonucleotide
ccgggcaggaggaaggagccucccu

SEQ ID NO: 1851 - RNA, 25 nt, Artificial Sequence
  Description of Artificial Sequence: Synthetic oligonucleotide
ucaggguuucgggaaccagaucucu

SEQ ID NO: 1852 - RNA, 25 nt, Artificial Sequence
  Description of Artificial Sequence: Synthetic oligonucleotide
ucaccaggaaagacugauacagaac

SEQ ID NO: 1853 - RNA, 25 nt, Artificial Sequence
  Description of Artificial Sequence: Synthetic oligonucleotide
cgaucgauacagaaaccacgcugcc

SEQ ID NO: 1854 - RNA, 25 nt, Artificial Sequence
  Description of Artificial Sequence: Synthetic oligonucleotide
cgccaccacaccaucaccaucgaca

SEQ ID NO: 1855 - RNA, 25 nt, Artificial Sequence
  Description of Artificial Sequence: Synthetic oligonucleotide
agaacaguccuuaauccagaaaccu

SEQ ID NO: 1856 - RNA, 25 nt, Artificial Sequence
  Description of Artificial Sequence: Synthetic oligonucleotide
ugaaaugaaggaagaggagacucug

SEQ ID NO: 1857 - RNA, 25 nt, Artificial Sequence
  Description of Artificial Sequence: Synthetic oligonucleotide
gcgcagagcacuuuggguccggagg

SEQ ID NO: 1858 - RNA, 25 nt, Artificial Sequence
  Description of Artificial Sequence: Synthetic oligonucleotide
ggcgagacuccggcggaagcauucc

SEQ ID NO: 1859 - RNA, 25 nt, Artificial Sequence
  Description of Artificial Sequence: Synthetic oligonucleotide
ccgggcgggugacccagcacggucc

SEQ ID NO: 1860 - RNA, 25 nt, Artificial Sequence
  Description of Artificial Sequence: Synthetic oligonucleotide
ccucuuggaauuggauucgccauuu

SEQ ID NO: 1861 - RNA, 25 nt, Artificial Sequence
  Description of Artificial Sequence: Synthetic oligonucleotide
uuauuuuucuugcugcuaaaucacc

SEQ ID NO: 1862 - RNA, 25 nt, Artificial Sequence
  Description of Artificial Sequence: Synthetic oligonucleotide
cgagcccggaagauuagagaguuuu

SEQ ID NO: 1863 - RNA, 25 nt, Artificial Sequence
  Description of Artificial Sequence: Synthetic oligonucleotide
uauuucugggauuccuguagacaca

SEQ ID NO: 1864 - RNA, 25 nt, Artificial Sequence
  Description of Artificial Sequence: Synthetic oligonucleotide
acccacccacauacauacauuuaua

SEQ ID NO: 1865 - RNA, 25 nt, Artificial Sequence
  Description of Artificial Sequence: Synthetic oligonucleotide
auauauauauauuauauauauauaa

SEQ ID NO: 1866 - RNA, 25 nt, Artificial Sequence
  Description of Artificial Sequence: Synthetic oligonucleotide
aaaauaaauaucucuauuuuauaua

SEQ ID NO: 1867 - RNA, 25 nt, Artificial Sequence
  Description of Artificial Sequence: Synthetic oligonucleotide
auauaaaauauauauauucuuuuuu

SEQ ID NO: 1868 - RNA, 25 nt, Artificial Sequence
  Description of Artificial Sequence: Synthetic oligonucleotide
uuaaauuaacagugcuaauguuauu

SEQ ID NO: 1869 - RNA, 25 nt, Artificial Sequence
  Description of Artificial Sequence: Synthetic oligonucleotide
uggugucuucacuggauguauuuga

SEQ ID NO: 1870 - RNA, 25 nt, Artificial Sequence
  Description of Artificial Sequence: Synthetic oligonucleotide
acugcuguggacuugaguugggagg

SEQ ID NO: 1871 - RNA, 25 nt, Artificial Sequence
  Description of Artificial Sequence: Synthetic oligonucleotide
gggaauguucccacucagauccuga

SEQ ID NO: 1872 - RNA, 25 nt, Artificial Sequence
  Description of Artificial Sequence: Synthetic oligonucleotide
acagggaagaggaggagaugagaga

SEQ ID NO: 1873 - RNA, 25 nt, Artificial Sequence
  Description of Artificial Sequence: Synthetic oligonucleotide
acucuggcaugaucuuuuuuuuguc

SEQ ID NO: 1874 - RNA, 25 nt, Artificial Sequence
  Description of Artificial Sequence: Synthetic oligonucleotide
cccacuugguggggccaggguccuc

SEQ ID NO: 1875 - RNA, 25 nt, Artificial Sequence
  Description of Artificial Sequence: Synthetic oligonucleotide
cuccccugcccaggaaugugcaagg

SEQ ID NO: 1876 - RNA, 25 nt, Artificial Sequence
  Description of Artificial Sequence: Synthetic oligonucleotide
gccagggcaugggggcaaauaugac

SEQ ID NO: 1877 - RNA, 25 nt, Artificial Sequence
  Description of Artificial Sequence: Synthetic oligonucleotide
cccaguuuugggaacaccgacaaac

SEQ ID NO: 1878 - RNA, 25 nt, Artificial Sequence
  Description of Artificial Sequence: Synthetic oligonucleotide
cccagcccuggcgcugagccucucu

SEQ ID NO: 1879 - RNA, 25 nt, Artificial Sequence
  Description of Artificial Sequence: Synthetic oligonucleotide
uaccccaggucagacggacagaaag

SEQ ID NO: 1880 - RNA, 25 nt, Artificial Sequence
  Description of Artificial Sequence: Synthetic oligonucleotide
gacagaucacagguacagggaugag

SEQ ID NO: 1881 - RNA, 25 nt, Artificial Sequence
  Description of Artificial Sequence: Synthetic oligonucleotide
ggacaccggcucugaccaggaguuu

SEQ ID NO: 1882 - RNA, 25 nt, Artificial Sequence
  Description of Artificial Sequence: Synthetic oligonucleotide
uggggagcuucaggacauugcugug

SEQ ID NO: 1883 - RNA, 25 nt, Artificial Sequence
  Description of Artificial Sequence: Synthetic oligonucleotide
gcuuuggggauucccuccacaugcu

SEQ ID NO: 1884 - RNA, 25 nt, Artificial Sequence
  Description of Artificial Sequence: Synthetic oligonucleotide
ugcacgcgcaucucgcccccagggg

SEQ ID NO: 1885 - RNA, 25 nt, Artificial Sequence
  Description of Artificial Sequence: Synthetic oligonucleotide
gcacugccuggaagauucaggagcc

SEQ ID NO: 1886 - RNA, 25 nt, Artificial Sequence
  Description of Artificial Sequence: Synthetic oligonucleotide
cugggcggccuucgcuuacucucac

SEQ ID NO: 1887 - RNA, 25 nt, Artificial Sequence
  Description of Artificial Sequence: Synthetic oligonucleotide
ccugcuucugaguugcccaggagac

SEQ ID NO: 1888 - RNA, 25 nt, Artificial Sequence
  Description of Artificial Sequence: Synthetic oligonucleotide
ccacuggcagaugucccggcgaaga

SEQ ID NO: 1889 - RNA, 25 nt, Artificial Sequence
  Description of Artificial Sequence: Synthetic oligonucleotide
agaagagacacauuguuggaagaag

SEQ ID NO: 1890 - RNA, 25 nt, Artificial Sequence
  Description of Artificial Sequence: Synthetic oligonucleotide
gcagcccaugacagcuccccuuccu

SEQ ID NO: 1891 - RNA, 25 nt, Artificial Sequence
  Description of Artificial Sequence: Synthetic oligonucleotide
ugggacucgcccucauccucuuccu

SEQ ID NO: 1892 - RNA, 25 nt, Artificial Sequence
  Description of Artificial Sequence: Synthetic oligonucleotide
ugcuccccuuccuggggugcagccu

SEQ ID NO: 1893 - RNA, 25 nt, Artificial Sequence
  Description of Artificial Sequence: Synthetic oligonucleotide
uaaaaggaccuauguccucacacca

SEQ ID NO: 1894 - RNA, 25 nt, Artificial Sequence
  Description of Artificial Sequence: Synthetic oligonucleotide
auugaaaccacuaguucuguccccc

SEQ ID NO: 1895 - RNA, 25 nt, Artificial Sequence
  Description of Artificial Sequence: Synthetic oligonucleotide
ccaggagaccugguugugugugugu

SEQ ID NO: 1896 - RNA, 25 nt, Artificial Sequence
  Description of Artificial Sequence: Synthetic oligonucleotide
ugagugguugaccuuccuccauccc

SEQ ID NO: 1897 - RNA, 25 nt, Artificial Sequence
  Description of Artificial Sequence: Synthetic oligonucleotide
ccugguccuucccuucccuucccga

SEQ ID NO: 1898 - RNA, 25 nt, Artificial Sequence
  Description of Artificial Sequence: Synthetic oligonucleotide
aggcacagagagacagggcaggauc

SEQ ID NO: 1899 - RNA, 25 nt, Artificial Sequence
  Description of Artificial Sequence: Synthetic oligonucleotide
ccacgugcccauuguggaggcagag

SEQ ID NO: 1900 - RNA, 25 nt, Artificial Sequence
  Description of Artificial Sequence: Synthetic oligonucleotide
gaaaagagaaaguguuuuauauacg

SEQ ID NO: 1901 - RNA, 25 nt, Artificial Sequence
  Description of Artificial Sequence: Synthetic oligonucleotide
gguacuuauuuaauaucccuuuuua

SEQ ID NO: 1902 - RNA, 25 nt, Artificial Sequence
  Description of Artificial Sequence: Synthetic oligonucleotide
aauuagaaauuaaaacaguuaauuu

SEQ ID NO: 1903 - RNA, 25 nt, Artificial Sequence
  Description of Artificial Sequence: Synthetic oligonucleotide
uaauuaaagaguaggguuuuuuuuc

SEQ ID NO: 1904 - RNA, 25 nt, Artificial Sequence
  Description of Artificial Sequence: Synthetic oligonucleotide
caguauucuugguuaauauuuaauu

SEQ ID NO: 1905 - RNA, 25 nt, Artificial Sequence
  Description of Artificial Sequence: Synthetic oligonucleotide
uucaacuauuuaugagauguaucuu

SEQ ID NO: 1906 - RNA, 25 nt, Artificial Sequence
  Description of Artificial Sequence: Synthetic oligonucleotide
uuugcucucucuugcucucuuauuu

SEQ ID NO: 1907 - RNA, 25 nt, Artificial Sequence
  Description of Artificial Sequence: Synthetic oligonucleotide
uguaccgguuuuuguauauaaaauu

SEQ ID NO: 1908 - RNA, 25 nt, Artificial Sequence
  Description of Artificial Sequence: Synthetic oligonucleotide
ucauguuuccaaucucucucucccu

SEQ ID NO: 1909 - RNA, 25 nt, Artificial Sequence
  Description of Artificial Sequence: Synthetic oligonucleotide
ugaucggugacagucacuagcuuau

SEQ ID NO: 1910 - RNA, 25 nt, Artificial Sequence
  Description of Artificial Sequence: Synthetic oligonucleotide
ucuugaacagauauuuaauuuugcu

SEQ ID NO: 1911 - RNA, 25 nt, Artificial Sequence
  Description of Artificial Sequence: Synthetic oligonucleotide
uaacacucagcucugcccuccccga

SEQ ID NO: 1912 - RNA, 25 nt, Artificial Sequence
  Description of Artificial Sequence: Synthetic oligonucleotide
auccccuggcuccccagcacacauu

SEQ ID NO: 1913 - RNA, 25 nt, Artificial Sequence
  Description of Artificial Sequence: Synthetic oligonucleotide
uccuuugaaauaagguuucaauaua

SEQ ID NO: 1914 - RNA, 25 nt, Artificial Sequence
  Description of Artificial Sequence: Synthetic oligonucleotide
acaucuacauacuauauauauauuu

SEQ ID NO: 1915 - RNA, 25 nt, Artificial Sequence
  Description of Artificial Sequence: Synthetic oligonucleotide
uggcaacuuguauuuguguguauau

SEQ ID NO: 1916 - RNA, 25 nt, Artificial Sequence
  Description of Artificial Sequence: Synthetic oligonucleotide
uauauauauauauguuuauguauau

SEQ ID NO: 1917 - RNA, 25 nt, Artificial Sequence
  Description of Artificial Sequence: Synthetic oligonucleotide
uaugugauucugauaaaauagacau

SEQ ID NO: 1918 - RNA, 25 nt, Artificial Sequence
  Description of Artificial Sequence: Synthetic oligonucleotide
uugcuauucuguuuuuuauauguaa

SEQ ID NO: 1919 - RNA, 25 nt, Artificial Sequence
  Description of Artificial Sequence: Synthetic oligonucleotide
aaaacaaaacaagaaaaaauagaga

SEQ ID NO: 1920 - RNA, 25 nt, Artificial Sequence
  Description of Artificial Sequence: Synthetic oligonucleotide
aauucuacauacuaaaucucucucc

SEQ ID NO: 1921 - RNA, 25 nt, Artificial Sequence
  Description of Artificial Sequence: Synthetic oligonucleotide
cuuuuuuaauuuuaauauuuguuau

SEQ ID NO: 1922 - RNA, 25 nt, Artificial Sequence
  Description of Artificial Sequence: Synthetic oligonucleotide
ucauuuauuuauuggugcuacuguu

SEQ ID NO: 1923 - RNA, 25 nt, Artificial Sequence
  Description of Artificial Sequence: Synthetic oligonucleotide
uuauccguaauaauuguggggaaaa

SEQ ID NO: 1924 - RNA, 25 nt, Artificial Sequence
  Description of Artificial Sequence: Synthetic oligonucleotide
agauauuaacaucacgucuuugucu

SEQ ID NO: 1925 - RNA, 25 nt, Artificial Sequence
  Description of Artificial Sequence: Synthetic oligonucleotide
ucuagugcaguuuuucgagauauuc

SEQ ID NO: 1926 - RNA, 25 nt, Artificial Sequence
  Description of Artificial Sequence: Synthetic oligonucleotide
ccguaguacauauuuauuuuuaaac

SEQ ID NO: 1927 - RNA, 25 nt, Artificial Sequence
  Description of Artificial Sequence: Synthetic oligonucleotide
caacgacaaagaaauacagauauau

SEQ ID NO: 1928 - RNA, 25 nt, Artificial Sequence
  Description of Artificial Sequence: Synthetic oligonucleotide
uauuaaagaauuuaauucugaucuc

SEQ ID NO: 1929 - RNA, 25 nt, Artificial Sequence
  Description of Artificial Sequence: Synthetic oligonucleotide
gaaagcgcaagaaaucccgucccug

SEQ ID NO: 1930 - RNA, 25 nt, Artificial Sequence
  Description of Artificial Sequence: Synthetic oligonucleotide
gugggccuugcucagagcggagaaa

SEQ ID NO: 1931 - RNA, 25 nt, Artificial Sequence
  Description of Artificial Sequence: Synthetic oligonucleotide
agcauuuguuuguacaagauccgca

SEQ ID NO: 1932 - RNA, 25 nt, Artificial Sequence
  Description of Artificial Sequence: Synthetic oligonucleotide
agacguguaaauguuccugcaaaaa

SEQ ID NO: 1933 - RNA, 25 nt, Artificial Sequence
  Description of Artificial Sequence: Synthetic oligonucleotide
acacagacucgcguugcaaggcgag

SEQ ID NO: 1934 - RNA, 25 nt, Artificial Sequence
  Description of Artificial Sequence: Synthetic oligonucleotide
ggcagcuugaguuaaacgaacguac

SEQ ID NO: 1935 - RNA, 25 nt, Artificial Sequence
  Description of Artificial Sequence: Synthetic oligonucleotide
cuugcagaugugacaagccgaggcg

SEQ ID NO: 1936 - RNA, 25 nt, Artificial Sequence
  Description of Artificial Sequence: Synthetic oligonucleotide
ggugagccgggcaggaggaaggagc

SEQ ID NO: 1937 - RNA, 25 nt, Artificial Sequence
  Description of Artificial Sequence: Synthetic oligonucleotide
ccucccucaggguuucgggaaccag

SEQ ID NO: 1938 - RNA, 25 nt, Artificial Sequence
  Description of Artificial Sequence: Synthetic oligonucleotide
gaucucucaccaggaaagacugaua

SEQ ID NO: 1939 - RNA, 25 nt, Artificial Sequence
  Description of Artificial Sequence: Synthetic oligonucleotide
acagaacgaucgauacagaaaccac

SEQ ID NO: 1940 - RNA, 25 nt, Artificial Sequence
  Description of Artificial Sequence: Synthetic oligonucleotide
cgcugccgccaccacaccaucacca

SEQ ID NO: 1941 - RNA, 25 nt, Artificial Sequence
  Description of Artificial Sequence: Synthetic oligonucleotide
aucgacagaacaguccuuaauccag

SEQ ID NO: 1942 - RNA, 25 nt, Artificial Sequence
  Description of Artificial Sequence: Synthetic oligonucleotide
gaaaccugaaaugaaggaagaggag

SEQ ID NO: 1943 - RNA, 25 nt, Artificial Sequence
  Description of Artificial Sequence: Synthetic oligonucleotide
gacucugcgcagagcacuuuggguc

SEQ ID NO: 1944 - RNA, 25 nt, Artificial Sequence
  Description of Artificial Sequence: Synthetic oligonucleotide
ccggagggcgagacuccggcggaag

SEQ ID NO: 1945 - RNA, 25 nt, Artificial Sequence
  Description of Artificial Sequence: Synthetic oligonucleotide
gcauucccgggcgggugacccagca

SEQ ID NO: 1946 - RNA, 25 nt, Artificial Sequence
  Description of Artificial Sequence: Synthetic oligonucleotide
acggucccucuuggaauuggauucg

SEQ ID NO: 1947 - RNA, 25 nt, Artificial Sequence
  Description of Artificial Sequence: Synthetic oligonucleotide
gccauuuuauuuuucuugcugcuaa

SEQ ID NO: 1948 - RNA, 25 nt, Artificial Sequence
  Description of Artificial Sequence: Synthetic oligonucleotide
aaucaccgagcccggaagauuagag

SEQ ID NO: 1949 - RNA, 25 nt, Artificial Sequence
  Description of Artificial Sequence: Synthetic oligonucleotide
gaguuuuauuucugggauuccugua

SEQ ID NO: 1950 - RNA, 25 nt, Artificial Sequence
  Description of Artificial Sequence: Synthetic oligonucleotide
agacacacccacccacauacauaca

SEQ ID NO: 1951 - RNA, 25 nt, Artificial Sequence
  Description of Artificial Sequence: Synthetic oligonucleotide
auuuauauauauauauauuauauau

SEQ ID NO: 1952 - RNA, 25 nt, Artificial Sequence
  Description of Artificial Sequence: Synthetic oligonucleotide
uauauaaaaauaaauaucucuauuu

SEQ ID NO: 1953 - RNA, 25 nt, Artificial Sequence
  Description of Artificial Sequence: Synthetic oligonucleotide
uuauauauauaaaauauauauauuc

SEQ ID NO: 1954 - RNA, 25 nt, Artificial Sequence
  Description of Artificial Sequence: Synthetic oligonucleotide
cuuuuuuuaaauuaacagugcuaau

SEQ ID NO: 1955 - RNA, 25 nt, Artificial Sequence
  Description of Artificial Sequence: Synthetic oligonucleotide
uguuauuggugucuucacuggaugu

SEQ ID NO: 1956 - RNA, 25 nt, Artificial Sequence
  Description of Artificial Sequence: Synthetic oligonucleotide
uauuugacugcuguggacuugaguu

SEQ ID NO: 1957 - RNA, 25 nt, Artificial Sequence
  Description of Artificial Sequence: Synthetic oligonucleotide
ugggaggggaauguucccacucaga

SEQ ID NO: 1958 - RNA, 25 nt, Artificial Sequence
  Description of Artificial Sequence: Synthetic oligonucleotide
auccugacagggaagaggaggagau

SEQ ID NO: 1959 - RNA, 25 nt, Artificial Sequence
  Description of Artificial Sequence: Synthetic oligonucleotide
ugagagacucuggcaugaucuuuuu

SEQ ID NO: 1960 - RNA, 25 nt, Artificial Sequence
  Description of Artificial Sequence: Synthetic oligonucleotide
uuuugucccacuugguggggccagg

SEQ ID NO: 1961 - RNA, 25 nt, Artificial Sequence
  Description of Artificial Sequence: Synthetic oligonucleotide
gguccucuccccugcccaggaaugu

SEQ ID NO: 1962 - RNA, 25 nt, Artificial Sequence
  Description of Artificial Sequence: Synthetic oligonucleotide
ugcaaggccagggcaugggggcaaa

SEQ ID NO: 1963 - RNA, 25 nt, Artificial Sequence
  Description of Artificial Sequence: Synthetic oligonucleotide
auaugacccaguuuugggaacaccg

SEQ ID NO: 1964 - RNA, 25 nt, Artificial Sequence
  Description of Artificial Sequence: Synthetic oligonucleotide
gacaaacccagcccuggcgcugagc

SEQ ID NO: 1965 - RNA, 25 nt, Artificial Sequence
  Description of Artificial Sequence: Synthetic oligonucleotide
ccucucuaccccaggucagacggac

SEQ ID NO: 1966 - RNA, 25 nt, Artificial Sequence
  Description of Artificial Sequence: Synthetic oligonucleotide
cagaaagacagaucacagguacagg

SEQ ID NO: 1967 - RNA, 25 nt, Artificial Sequence
  Description of Artificial Sequence: Synthetic oligonucleotide
ggaugaggacaccggcucugaccag

SEQ ID NO: 1968 - RNA, 25 nt, Artificial Sequence
  Description of Artificial Sequence: Synthetic oligonucleotide
ggaguuuggggagcuucaggacauu

SEQ ID NO: 1969 - RNA, 25 nt, Artificial Sequence
  Description of Artificial Sequence: Synthetic oligonucleotide
ugcugugcuuuggggauucccucca

SEQ ID NO: 1970 - RNA, 25 nt, Artificial Sequence
  Description of Artificial Sequence: Synthetic oligonucleotide
acaugcugcacgcgcaucucgcccc

SEQ ID NO: 1971 - RNA, 25 nt, Artificial Sequence
  Description of Artificial Sequence: Synthetic oligonucleotide
ccaggggcacugccuggaagauuca

SEQ ID NO: 1972 - RNA, 25 nt, Artificial Sequence
  Description of Artificial Sequence: Synthetic oligonucleotide
aggagccugggcggccuucgcuuac

SEQ ID NO: 1973 - RNA, 25 nt, Artificial Sequence
  Description of Artificial Sequence: Synthetic oligonucleotide
cucucaccugcuucugaguugccca

SEQ ID NO: 1974 - RNA, 25 nt, Artificial Sequence
  Description of Artificial Sequence: Synthetic oligonucleotide
aggagaccacuggcagaugucccgg

SEQ ID NO: 1975 - RNA, 25 nt, Artificial Sequence
  Description of Artificial Sequence: Synthetic oligonucleotide
gcgaagagaagagacacauuguugg

SEQ ID NO: 1976 - RNA, 25 nt, Artificial Sequence
  Description of Artificial Sequence: Synthetic oligonucleotide
gaagaagcagcccaugacagcuccc

SEQ ID NO: 1977 - RNA, 25 nt, Artificial Sequence
  Description of Artificial Sequence: Synthetic oligonucleotide
ccuuccugggacucgcccucauccu

SEQ ID NO: 1978 - RNA, 25 nt, Artificial Sequence
  Description of Artificial Sequence: Synthetic oligonucleotide
ucuuccugcuccccuuccuggggug

SEQ ID NO: 1979 - RNA, 25 nt, Artificial Sequence
  Description of Artificial Sequence: Synthetic oligonucleotide
gcagccuaaaaggaccuauguccuc

SEQ ID NO: 1980 - RNA, 25 nt, Artificial Sequence
  Description of Artificial Sequence: Synthetic oligonucleotide
cacaccauugaaaccacuaguucug

SEQ ID NO: 1981 - RNA, 25 nt, Artificial Sequence
  Description of Artificial Sequence: Synthetic oligonucleotide
guccccccaggagaccugguugugu

SEQ ID NO: 1982 - RNA, 25 nt, Artificial Sequence
  Description of Artificial Sequence: Synthetic oligonucleotide
ugugugugagugguugaccuuccuc

SEQ ID NO: 1983 - RNA, 25 nt, Artificial Sequence
  Description of Artificial Sequence: Synthetic oligonucleotide
ccauccccugguccuucccuucccu

SEQ ID NO: 1984 - RNA, 25 nt, Artificial Sequence
  Description of Artificial Sequence: Synthetic oligonucleotide
uucccgaggcacagagagacagggc

SEQ ID NO: 1985 - RNA, 25 nt, Artificial Sequence
  Description of Artificial Sequence: Synthetic oligonucleotide
caggauccacgugcccauuguggag

SEQ ID NO: 1986 - RNA, 25 nt, Artificial Sequence
  Description of Artificial Sequence: Synthetic oligonucleotide
ggcagagaaaagagaaaguguuuua

SEQ ID NO: 1987 - RNA, 25 nt, Artificial Sequence
  Description of Artificial Sequence: Synthetic oligonucleotide
auauacgguacuuauuuaauauccc

SEQ ID NO: 1988 - RNA, 25 nt, Artificial Sequence
  Description of Artificial Sequence: Synthetic oligonucleotide
cuuuuuaauuagaaauuaaaacagu

SEQ ID NO: 1989 - RNA, 25 nt, Artificial Sequence
  Description of Artificial Sequence: Synthetic oligonucleotide
uuaauuuaauuaaagaguaggguuu

SEQ ID NO: 1990 - RNA, 25 nt, Artificial Sequence
  Description of Artificial Sequence: Synthetic oligonucleotide
uuuuuucaguauucuugguuaauau

SEQ ID NO: 1991 - RNA, 25 nt, Artificial Sequence
  Description of Artificial Sequence: Synthetic oligonucleotide
uuuaauuucaacuauuuaugagaug

SEQ ID NO: 1992 - RNA, 25 nt, Artificial Sequence
  Description of Artificial Sequence: Synthetic oligonucleotide
guaucuuuugcucucucuugcucuc

SEQ ID NO: 1993 - RNA, 25 nt, Artificial Sequence
  Description of Artificial Sequence: Synthetic oligonucleotide
cuuauuuguaccgguuuuuguauau

SEQ ID NO: 1994 - RNA, 25 nt, Artificial Sequence
  Description of Artificial Sequence: Synthetic oligonucleotide
uaaaauucauguuuccaaucucucu

SEQ ID NO: 1995 - RNA, 25 nt, Artificial Sequence
  Description of Artificial Sequence: Synthetic oligonucleotide
ucucccugaucggugacagucacua

SEQ ID NO: 1996 - RNA, 25 nt, Artificial Sequence
  Description of Artificial Sequence: Synthetic oligonucleotide
agcuuaucuugaacagauauuuaau

SEQ ID NO: 1997 - RNA, 25 nt, Artificial Sequence
  Description of Artificial Sequence: Synthetic oligonucleotide
uuuugcuaacacucagcucugcccu

SEQ ID NO: 1998 - RNA, 25 nt, Artificial Sequence
  Description of Artificial Sequence: Synthetic oligonucleotide
uccccgauccccuggcuccccagca

SEQ ID NO: 1999 - RNA, 25 nt, Artificial Sequence
  Description of Artificial Sequence: Synthetic oligonucleotide
acacauuccuuugaaauaagguuuc

SEQ ID NO: 2000 - RNA, 25 nt, Artificial Sequence
  Description of Artificial Sequence: Synthetic oligonucleotide
caauauacaucuacauacuauauau

SEQ ID NO: 2001 - RNA, 25 nt, Artificial Sequence
  Description of Artificial Sequence: Synthetic oligonucleotide
uauauuuggcaacuuguauuugugu

SEQ ID NO: 2002 - RNA, 25 nt, Artificial Sequence
  Description of Artificial Sequence: Synthetic oligonucleotide
uguauauauauauauauauguuuau

SEQ ID NO: 2003 - RNA, 25 nt, Artificial Sequence
  Description of Artificial Sequence: Synthetic oligonucleotide
uguauauaugugauucugauaaaau

SEQ ID NO: 2004 - RNA, 25 nt, Artificial Sequence
  Description of Artificial Sequence: Synthetic oligonucleotide
uagacauugcuauucuguuuuuuau

SEQ ID NO: 2005 - RNA, 25 nt, Artificial Sequence
  Description of Artificial Sequence: Synthetic oligonucleotide
uauguaaaaacaaaacaagaaaaaa

SEQ ID NO: 2006 - RNA, 25 nt, Artificial Sequence
  Description of Artificial Sequence: Synthetic oligonucleotide
auagagaauucuacauacuaaaucu

SEQ ID NO: 2007 - RNA, 25 nt, Artificial Sequence
  Description of Artificial Sequence: Synthetic oligonucleotide
ucucuccuuuuuuaauuuuaauauu

SEQ ID NO: 2008 - RNA, 25 nt, Artificial Sequence
  Description of Artificial Sequence: Synthetic oligonucleotide
uuguuaucauuuauuuauuggugcu

SEQ ID NO: 2009 - RNA, 25 nt, Artificial Sequence
  Description of Artificial Sequence: Synthetic oligonucleotide
uacuguuuauccguaauaauugugg

SEQ ID NO: 2010 - RNA, 25 nt, Artificial Sequence
  Description of Artificial Sequence: Synthetic oligonucleotide
gggaaaagauauuaacaucacgucu

SEQ ID NO: 2011 - RNA, 25 nt, Artificial Sequence
  Description of Artificial Sequence: Synthetic oligonucleotide
uuugucucuagugcaguuuuucgag

SEQ ID NO: 2012 - RNA, 25 nt, Artificial Sequence
  Description of Artificial Sequence: Synthetic oligonucleotide
gauauuccguaguacauauuuauuu

SEQ ID NO: 2013 - RNA, 25 nt, Artificial Sequence
  Description of Artificial Sequence: Synthetic oligonucleotide
uuuaaacaacgacaaagaaauacag

SEQ ID NO: 2014 - RNA, 25 nt, Artificial Sequence
  Description of Artificial Sequence: Synthetic oligonucleotide
auuuuguauuaaagaauuuaauucu

SEQ ID NO: 2015 - RNA, 25 nt, Artificial Sequence
  Description of Artificial Sequence: Synthetic oligonucleotide
caagacaagaaaaucccugugggcc

SEQ ID NO: 2016 - RNA, 25 nt, Artificial Sequence
  Description of Artificial Sequence: Synthetic oligonucleotide
acucgcguugcaagaugugacaagc

SEQ ID NO: 2017 - RNA, 25 nt, Artificial Sequence
  Description of Artificial Sequence: Synthetic oligonucleotide
ccgaggcggugagccgggcaggagg

SEQ ID NO: 2018 - RNA, 25 nt, Artificial Sequence
  Description of Artificial Sequence: Synthetic oligonucleotide
gaaggagccucccucaggguuucgg

SEQ ID NO: 2019 - RNA, 25 nt, Artificial Sequence
  Description of Artificial Sequence: Synthetic oligonucleotide
ggaaccagaucucucaccaggaaag

SEQ ID NO: 2020 - RNA, 25 nt, Artificial Sequence
  Description of Artificial Sequence: Synthetic oligonucleotide
gacugauacagaacgaucgauacag

SEQ ID NO: 2021 - RNA, 25 nt, Artificial Sequence
  Description of Artificial Sequence: Synthetic oligonucleotide
gaaaccacgcugccgccaccacacc

SEQ ID NO: 2022 - RNA, 25 nt, Artificial Sequence
  Description of Artificial Sequence: Synthetic oligonucleotide
caucaccaucgacagaacaguccuu

SEQ ID NO: 2023 - RNA, 25 nt, Artificial Sequence
  Description of Artificial Sequence: Synthetic oligonucleotide
uaauccagaaaccugaaaugaagga

SEQ ID NO: 2024 - RNA, 25 nt, Artificial Sequence
  Description of Artificial Sequence: Synthetic oligonucleotide
aagaggagacucugcgcagagcacu

SEQ ID NO: 2025 - RNA, 25 nt, Artificial Sequence
  Description of Artificial Sequence: Synthetic oligonucleotide
uuuggguccggagggcgagacuccg

SEQ ID NO: 2026 - RNA, 25 nt, Artificial Sequence
  Description of Artificial Sequence: Synthetic oligonucleotide
ggcggaagcauucccgggcggguga

SEQ ID NO: 2027 - RNA, 25 nt, Artificial Sequence
  Description of Artificial Sequence: Synthetic oligonucleotide
acccagcacggucccucuuggaauu

SEQ ID NO: 2028 - RNA, 25 nt, Artificial Sequence
  Description of Artificial Sequence: Synthetic oligonucleotide
uggauucgccauuuuauuuuucuug

SEQ ID NO: 2029 - RNA, 25 nt, Artificial Sequence
  Description of Artificial Sequence: Synthetic oligonucleotide
gcugcuaaaucaccgagcccggaag

SEQ ID NO: 2030 - RNA, 25 nt, Artificial Sequence
  Description of Artificial Sequence: Synthetic oligonucleotide
gauuagagaguuuuauuucugggau

SEQ ID NO: 2031 - RNA, 25 nt, Artificial Sequence
  Description of Artificial Sequence: Synthetic oligonucleotide
uuccuguagacacacccacccacau

SEQ ID NO: 2032 - RNA, 25 nt, Artificial Sequence
  Description of Artificial Sequence: Synthetic oligonucleotide
uacauacauuuauauauauauauau

SEQ ID NO: 2033 - RNA, 25 nt, Artificial Sequence
  Description of Artificial Sequence: Synthetic oligonucleotide
uuauauauauauaaaaauaaauauc

SEQ ID NO: 2034 - RNA, 25 nt, Artificial Sequence
  Description of Artificial Sequence: Synthetic oligonucleotide
cucuauuuuauauauauaaaauaua

SEQ ID NO: 2035 - RNA, 25 nt, Artificial Sequence
  Description of Artificial Sequence: Synthetic oligonucleotide
auauauucuuuuuuuaaauuaacag

SEQ ID NO: 2036 - RNA, 25 nt, Artificial Sequence
  Description of Artificial Sequence: Synthetic oligonucleotide
gugcuaauguuauuggugucuucac

SEQ ID NO: 2037 - RNA, 25 nt, Artificial Sequence
  Description of Artificial Sequence: Synthetic oligonucleotide
cuggauguauuugacugcuguggac

SEQ ID NO: 2038 - RNA, 25 nt, Artificial Sequence
  Description of Artificial Sequence: Synthetic oligonucleotide
cuugaguugggaggggaauguuccc

SEQ ID NO: 2039 - RNA, 25 nt, Artificial Sequence
  Description of Artificial Sequence: Synthetic oligonucleotide
cacucagauccugacagggaagagg

SEQ ID NO: 2040 - RNA, 25 nt, Artificial Sequence
  Description of Artificial Sequence: Synthetic oligonucleotide
gaggagaugagagacucuggcauga

SEQ ID NO: 2041 - RNA, 25 nt, Artificial Sequence
  Description of Artificial Sequence: Synthetic oligonucleotide
aucuuuuuuuugucccacuuggugg

SEQ ID NO: 2042 - RNA, 25 nt, Artificial Sequence
  Description of Artificial Sequence: Synthetic oligonucleotide
gggccaggguccucuccccugccca

SEQ ID NO: 2043 - RNA, 25 nt, Artificial Sequence
  Description of Artificial Sequence: Synthetic oligonucleotide
aggaaugugcaaggccagggcaugg

SEQ ID NO: 2044 - RNA, 25 nt, Artificial Sequence
  Description of Artificial Sequence: Synthetic oligonucleotide
ggggcaaauaugacccaguuuuggg

SEQ ID NO: 2045 - RNA, 25 nt, Artificial Sequence
  Description of Artificial Sequence: Synthetic oligonucleotide
gaacaccgacaaacccagcccuggc

SEQ ID NO: 2046 - RNA, 25 nt, Artificial Sequence
  Description of Artificial Sequence: Synthetic oligonucleotide
cgcugagccucucuaccccagguca

SEQ ID NO: 2047 - RNA, 25 nt, Artificial Sequence
  Description of Artificial Sequence: Synthetic oligonucleotide
agacggacagaaagacagaucacag

SEQ ID NO: 2048 - RNA, 25 nt, Artificial Sequence
  Description of Artificial Sequence: Synthetic oligonucleotide
gguacagggaugaggacaccggcuc

SEQ ID NO: 2049 - RNA, 25 nt, Artificial Sequence
  Description of Artificial Sequence: Synthetic oligonucleotide
cugaccaggaguuuggggagcuuca

SEQ ID NO: 2050 - RNA, 25 nt, Artificial Sequence
  Description of Artificial Sequence: Synthetic oligonucleotide
aggacauugcugugcuuuggggauu

SEQ ID NO: 2051 - RNA, 25 nt, Artificial Sequence
  Description of Artificial Sequence: Synthetic oligonucleotide
ucccuccacaugcugcacgcgcauc

SEQ ID NO: 2052 - RNA, 25 nt, Artificial Sequence
  Description of Artificial Sequence: Synthetic oligonucleotide
cucgcccccaggggcacugccugga

SEQ ID NO: 2053 - RNA, 25 nt, Artificial Sequence
  Description of Artificial Sequence: Synthetic oligonucleotide
aagauucaggagccugggcggccuu

SEQ ID NO: 2054 - RNA, 25 nt, Artificial Sequence
  Description of Artificial Sequence: Synthetic oligonucleotide
ucgcuuacucucaccugcuucugag

SEQ ID NO: 2055 - RNA, 25 nt, Artificial Sequence
  Description of Artificial Sequence: Synthetic oligonucleotide
guugcccaggagaccacuggcagau

SEQ ID NO: 2056 - RNA, 25 nt, Artificial Sequence
  Description of Artificial Sequence: Synthetic oligonucleotide
ugucccggcgaagagaagagacaca

SEQ ID NO: 2057 - RNA, 25 nt, Artificial Sequence
  Description of Artificial Sequence: Synthetic oligonucleotide
auuguuggaagaagcagcccaugac

SEQ ID NO: 2058 - RNA, 25 nt, Artificial Sequence
  Description of Artificial Sequence: Synthetic oligonucleotide
cagcuccccuuccugggacucgccc

SEQ ID NO: 2059 - RNA, 25 nt, Artificial Sequence
  Description of Artificial Sequence: Synthetic oligonucleotide
cucauccucuuccugcuccccuucc

SEQ ID NO: 2060 - RNA, 25 nt, Artificial Sequence
  Description of Artificial Sequence: Synthetic oligonucleotide
cuggggugcagccuaaaaggaccua

SEQ ID NO: 2061 - RNA, 25 nt, Artificial Sequence
  Description of Artificial Sequence: Synthetic oligonucleotide
auguccucacaccauugaaaccacu

SEQ ID NO: 2062 - RNA, 25 nt, Artificial Sequence
  Description of Artificial Sequence: Synthetic oligonucleotide
uaguucuguccccccaggagaccug

SEQ ID NO: 2063 - RNA, 25 nt, Artificial Sequence
  Description of Artificial Sequence: Synthetic oligonucleotide
gguugugugugugugagugguugac

SEQ ID NO: 2064 - RNA, 25 nt, Artificial Sequence
  Description of Artificial Sequence: Synthetic oligonucleotide
ccuuccuccauccccugguccuucc

SEQ ID NO: 2065 - RNA, 25 nt, Artificial Sequence
  Description of Artificial Sequence: Synthetic oligonucleotide
ccuucccuucccgaggcacagagag

SEQ ID NO: 2066 - RNA, 25 nt, Artificial Sequence
  Description of Artificial Sequence: Synthetic oligonucleotide
gacagggcaggauccacgugcccau

SEQ ID NO: 2067 - RNA, 25 nt, Artificial Sequence
  Description of Artificial Sequence: Synthetic oligonucleotide
uuguggaggcagagaaaagagaaag

SEQ ID NO: 2068 - RNA, 25 nt, Artificial Sequence
  Description of Artificial Sequence: Synthetic oligonucleotide
guguuuuauauacgguacuuauuua

SEQ ID NO: 2069 - RNA, 25 nt, Artificial Sequence
  Description of Artificial Sequence: Synthetic oligonucleotide
aauaucccuuuuuaauuagaaauua

SEQ ID NO: 2070 - RNA, 25 nt, Artificial Sequence
  Description of Artificial Sequence: Synthetic oligonucleotide
aaaacaguuaauuuaauuaaagagu

SEQ ID NO: 2071 - RNA, 25 nt, Artificial Sequence
  Description of Artificial Sequence: Synthetic oligonucleotide
uaggguuuuuuuucaguauucuugg

SEQ ID NO: 2072 - RNA, 25 nt, Artificial Sequence
  Description of Artificial Sequence: Synthetic oligonucleotide
guuaauauuuaauuucaacuauuua

SEQ ID NO: 2073 - RNA, 25 nt, Artificial Sequence
  Description of Artificial Sequence: Synthetic oligonucleotide
augagauguaucuuuugcucucucu

SEQ ID NO: 2074 - RNA, 25 nt, Artificial Sequence
  Description of Artificial Sequence: Synthetic oligonucleotide
uugcucucuuauuuguaccgguuuu

SEQ ID NO: 2075 - RNA, 25 nt, Artificial Sequence
  Description of Artificial Sequence: Synthetic oligonucleotide
uuguauauaaaauucauguuuccaa

SEQ ID NO: 2076 - RNA, 25 nt, Artificial Sequence
  Description of Artificial Sequence: Synthetic oligonucleotide
aucucucucucccugaucggugaca

SEQ ID NO: 2077 - RNA, 25 nt, Artificial Sequence
  Description of Artificial Sequence: Synthetic oligonucleotide
agucacuagcuuaucuugaacagau

SEQ ID NO: 2078 - RNA, 25 nt, Artificial Sequence
  Description of Artificial Sequence: Synthetic oligonucleotide
uauuuaauuuugcuaacacucagcu

SEQ ID NO: 2079 - RNA, 25 nt, Artificial Sequence
  Description of Artificial Sequence: Synthetic oligonucleotide
ucugcccuccccgauccccuggcuc

SEQ ID NO: 2080 - RNA, 25 nt, Artificial Sequence
  Description of Artificial Sequence: Synthetic oligonucleotide
ccccagcacacauuccuuugaaaua

SEQ ID NO: 2081 - RNA, 25 nt, Artificial Sequence
  Description of Artificial Sequence: Synthetic oligonucleotide
aagguuucaauauacaucuacauac

SEQ ID NO: 2082 - RNA, 25 nt, Artificial Sequence
  Description of Artificial Sequence: Synthetic oligonucleotide
cuauauauauauuuggcaacuugua

SEQ ID NO: 2083 - RNA, 25 nt, Artificial Sequence
  Description of Artificial Sequence: Synthetic oligonucleotide
auuuguguguauauauauauauaua

SEQ ID NO: 2084 - RNA, 25 nt, Artificial Sequence
  Description of Artificial Sequence: Synthetic oligonucleotide
auguuuauguauauaugugauucug

SEQ ID NO: 2085 - RNA, 25 nt, Artificial Sequence
  Description of Artificial Sequence: Synthetic oligonucleotide
gauaaaauagacauugcuauucugu

SEQ ID NO: 2086 - RNA, 25 nt, Artificial Sequence
  Description of Artificial Sequence: Synthetic oligonucleotide
uuuuuuauauguaaaaacaaaacaa

SEQ ID NO: 2087 - RNA, 25 nt, Artificial Sequence
  Description of Artificial Sequence: Synthetic oligonucleotide
agaaaaaauagagaauucuacauac

SEQ ID NO: 2088 - RNA, 25 nt, Artificial Sequence
  Description of Artificial Sequence: Synthetic oligonucleotide
cuaaaucucucuccuuuuuuaauuu

SEQ ID NO: 2089 - RNA, 25 nt, Artificial Sequence
  Description of Artificial Sequence: Synthetic oligonucleotide
uuaauauuuguuaucauuuauuuau

SEQ ID NO: 2090 - RNA, 25 nt, Artificial Sequence
  Description of Artificial Sequence: Synthetic oligonucleotide
uuggugcuacuguuuauccguaaua

SEQ ID NO: 2091 - RNA, 25 nt, Artificial Sequence
  Description of Artificial Sequence: Synthetic oligonucleotide
aauuguggggaaaagauauuaacau

SEQ ID NO: 2092 - RNA, 25 nt, Artificial Sequence
  Description of Artificial Sequence: Synthetic oligonucleotide
ucacgucuuugucucuagugcaguu

SEQ ID NO: 2093 - RNA, 25 nt, Artificial Sequence
  Description of Artificial Sequence: Synthetic oligonucleotide
uuuucgagauauuccguaguacaua

SEQ ID NO: 2094 - RNA, 25 nt, Artificial Sequence
  Description of Artificial Sequence: Synthetic oligonucleotide
auuuauuuuuaaacaacgacaaaga

SEQ ID NO: 2095 - RNA, 25 nt, Artificial Sequence
  Description of Artificial Sequence: Synthetic oligonucleotide
aaauacagauauaucuuaaaaaaaa

SEQ ID NO: 2096 - RNA, 25 nt, Artificial Sequence
  Description of Artificial Sequence: Synthetic oligonucleotide
aaaaagcauuuuguauuaaagaauu

SEQ ID NO: 2097 - RNA, 25 nt, Artificial Sequence
  Description of Artificial Sequence: Synthetic oligonucleotide
aguccuggagcguguacguuggugc

SEQ ID NO: 2098 - RNA, 25 nt, Artificial Sequence
  Description of Artificial Sequence: Synthetic oligonucleotide
cccgcugcugucuaaugcccuggag

SEQ ID NO: 2099 - RNA, 25 nt, Artificial Sequence
  Description of Artificial Sequence: Synthetic oligonucleotide
gccucccuggcccccaucccugugg

SEQ ID NO: 2100 - RNA, 25 nt, Artificial Sequence
  Description of Artificial Sequence: Synthetic oligonucleotide
ggccuugcucagagcggagaaagca

SEQ ID NO: 2101 - RNA, 25 nt, Artificial Sequence
  Description of Artificial Sequence: Synthetic oligonucleotide
auuuguuuguacaagauccgcagac

SEQ ID NO: 2102 - RNA, 25 nt, Artificial Sequence
  Description of Artificial Sequence: Synthetic oligonucleotide
cguguaaauguuccugcaaaaacac

SEQ ID NO: 2103 - RNA, 25 nt, Artificial Sequence
  Description of Artificial Sequence: Synthetic oligonucleotide
cagacucgcguugcaaggcgaggca

SEQ ID NO: 2104 - RNA, 25 nt, Artificial Sequence
  Description of Artificial Sequence: Synthetic oligonucleotide
agcuugaguuaaacgaacguacuug

SEQ ID NO: 2105 - RNA, 25 nt, Artificial Sequence
  Description of Artificial Sequence: Synthetic oligonucleotide
gcagaugugacaagccgaggcggug

SEQ ID NO: 2106 - RNA, 25 nt, Artificial Sequence
  Description of Artificial Sequence: Synthetic oligonucleotide
gagccgggcaggaggaaggagccuc

SEQ ID NO: 2107 - RNA, 25 nt, Artificial Sequence
  Description of Artificial Sequence: Synthetic oligonucleotide
cccucaggguuucgggaaccagauc

SEQ ID NO: 2108 - RNA, 25 nt, Artificial Sequence
  Description of Artificial Sequence: Synthetic oligonucleotide
cucucaccaggaaagacugauacag

SEQ ID NO: 2109 - RNA, 25 nt, Artificial Sequence
  Description of Artificial Sequence: Synthetic oligonucleotide
gaacgaucgauacagaaaccacgcu

SEQ ID NO: 2110 - RNA, 25 nt, Artificial Sequence
  Description of Artificial Sequence: Synthetic oligonucleotide
ugccgccaccacaccaucaccaucg

SEQ ID NO: 2111 - RNA, 25 nt, Artificial Sequence
  Description of Artificial Sequence: Synthetic oligonucleotide
gacagaacaguccuuaauccagaaa

SEQ ID NO: 2112 - RNA, 25 nt, Artificial Sequence
  Description of Artificial Sequence: Synthetic oligonucleotide
accugaaaugaaggaagaggagacu

SEQ ID NO: 2113 - RNA, 25 nt, Artificial Sequence
  Description of Artificial Sequence: Synthetic oligonucleotide
ucugcgcagagcacuuuggguccgg

SEQ ID NO: 2114 - RNA, 25 nt, Artificial Sequence
  Description of Artificial Sequence: Synthetic oligonucleotide
gagggcgagacuccggcggaagcau

SEQ ID NO: 2115 - RNA, 25 nt, Artificial Sequence
  Description of Artificial Sequence: Synthetic oligonucleotide
uucccgggcgggugacccagcacgg

SEQ ID NO: 2116 - RNA, 25 nt, Artificial Sequence
  Description of Artificial Sequence: Synthetic oligonucleotide
gucccucuuggaauuggauucgcca

SEQ ID NO: 2117 - RNA, 25 nt, Artificial Sequence
  Description of Artificial Sequence: Synthetic oligonucleotide
auuuuauuuuucuugcugcuaaauc

SEQ ID NO: 2118 - RNA, 25 nt, Artificial Sequence
  Description of Artificial Sequence: Synthetic oligonucleotide
caccgagcccggaagauuagagagu

SEQ ID NO: 2119 - RNA, 25 nt, Artificial Sequence
  Description of Artificial Sequence: Synthetic oligonucleotide
uuuuauuucugggauuccuguagac

SEQ ID NO: 2120 - RNA, 25 nt, Artificial Sequence
  Description of Artificial Sequence: Synthetic oligonucleotide
cacacccacccacauacauacauuu

SEQ ID NO: 2121 - RNA, 25 nt, Artificial Sequence
  Description of Artificial Sequence: Synthetic oligonucleotide
uauauauauauauauuauauauaua

SEQ ID NO: 2122 - RNA, 25 nt, Artificial Sequence
  Description of Artificial Sequence: Synthetic oligonucleotide
auaaaaauaaauaucucuauuuuau

SEQ ID NO: 2123 - RNA, 25 nt, Artificial Sequence
  Description of Artificial Sequence: Synthetic oligonucleotide
uauauauaaaauauauauauucuuu

SEQ ID NO: 2124 - RNA, 25 nt, Artificial Sequence
  Description of Artificial Sequence: Synthetic oligonucleotide
uuuuuaaauuaacagugcuaauguu

SEQ ID NO: 2125 - RNA, 25 nt, Artificial Sequence
  Description of Artificial Sequence: Synthetic oligonucleotide
uauuggugucuucacuggauguauu

SEQ ID NO: 2126 - RNA, 25 nt, Artificial Sequence
  Description of Artificial Sequence: Synthetic oligonucleotide
uugacugcuguggacuugaguuggg

SEQ ID NO: 2127 - RNA, 25 nt, Artificial Sequence
  Description of Artificial Sequence: Synthetic oligonucleotide
gaggggaauguucccacucagaucc

SEQ ID NO: 2128 - RNA, 25 nt, Artificial Sequence
  Description of Artificial Sequence: Synthetic oligonucleotide
cugacagggaagaggaggagaugag

SEQ ID NO: 2129 - RNA, 25 nt, Artificial Sequence
  Description of Artificial Sequence: Synthetic oligonucleotide
gagacucuggcaugaucuuuuuuuu

SEQ ID NO: 2130 - RNA, 25 nt, Artificial Sequence
  Description of Artificial Sequence: Synthetic oligonucleotide
ugucccacuugguggggccaggguc

SEQ ID NO: 2131 - RNA, 25 nt, Artificial Sequence
  Description of Artificial Sequence: Synthetic oligonucleotide
ccucuccccugcccaggaaugugca

SEQ ID NO: 2132 - RNA, 25 nt, Artificial Sequence
  Description of Artificial Sequence: Synthetic oligonucleotide
aaggccagggcaugggggcaaauau

SEQ ID NO: 2133 - RNA, 25 nt, Artificial Sequence
  Description of Artificial Sequence: Synthetic oligonucleotide
ugacccaguuuugggaacaccgaca

SEQ ID NO: 2134 - RNA, 25 nt, Artificial Sequence
  Description of Artificial Sequence: Synthetic oligonucleotide
aaacccagcccuggcgcugagccuc

SEQ ID NO: 2135 - RNA, 25 nt, Artificial Sequence
  Description of Artificial Sequence: Synthetic oligonucleotide
cucuaccccaggucagacggacaga

SEQ ID NO: 2136 - RNA, 25 nt, Artificial Sequence
  Description of Artificial Sequence: Synthetic oligonucleotide
aaagacagaucacagguacagggau

SEQ ID NO: 2137 - RNA, 25 nt, Artificial Sequence
  Description of Artificial Sequence: Synthetic oligonucleotide
ugaggacaccggcucugaccaggag

SEQ ID NO: 2138 - RNA, 25 nt, Artificial Sequence
  Description of Artificial Sequence: Synthetic oligonucleotide
guuuggggagcuucaggacauugcu

SEQ ID NO: 2139 - RNA, 25 nt, Artificial Sequence
  Description of Artificial Sequence: Synthetic oligonucleotide
ugugcuuuggggauucccuccacau

SEQ ID NO: 2140 - RNA, 25 nt, Artificial Sequence
  Description of Artificial Sequence: Synthetic oligonucleotide
ugcugcacgcgcaucucgcccccag

SEQ ID NO: 2141 - RNA, 25 nt, Artificial Sequence
  Description of Artificial Sequence: Synthetic oligonucleotide
ggggcacugccuggaagauucagga

SEQ ID NO: 2142 - RNA, 25 nt, Artificial Sequence
  Description of Artificial Sequence: Synthetic oligonucleotide
agccugggcggccuucgcuuacucu

SEQ ID NO: 2143 - RNA, 25 nt, Artificial Sequence
  Description of Artificial Sequence: Synthetic oligonucleotide
ucaccugcuucugaguugcccagga

SEQ ID NO: 2144 - RNA, 25 nt, Artificial Sequence
  Description of Artificial Sequence: Synthetic oligonucleotide
agaccacuggcagaugucccggcga

SEQ ID NO: 2145 - RNA, 25 nt, Artificial Sequence
  Description of Artificial Sequence: Synthetic oligonucleotide
aagagaagagacacauuguuggaag

SEQ ID NO: 2146 - RNA, 25 nt, Artificial Sequence
  Description of Artificial Sequence: Synthetic oligonucleotide
gaagcagcccaugacagcuccccuu

SEQ ID NO: 2147 - RNA, 25 nt, Artificial Sequence
  Description of Artificial Sequence: Synthetic oligonucleotide
uccugggacucgcccucauccucuu

SEQ ID NO: 2148 - RNA, 25 nt, Artificial Sequence
  Description of Artificial Sequence: Synthetic oligonucleotide
uccugcuccccuuccuggggugcag

SEQ ID NO: 2149 - RNA, 25 nt, Artificial Sequence
  Description of Artificial Sequence: Synthetic oligonucleotide
gccuaaaaggaccuauguccucaca

SEQ ID NO: 2150 - RNA, 25 nt, Artificial Sequence
  Description of Artificial Sequence: Synthetic oligonucleotide
accauugaaaccacuaguucugucc

SEQ ID NO: 2151 - RNA, 25 nt, Artificial Sequence
  Description of Artificial Sequence: Synthetic oligonucleotide
cccccaggagaccugguugugugug

SEQ ID NO: 2152 - RNA, 25 nt, Artificial Sequence
  Description of Artificial Sequence: Synthetic oligonucleotide
gugugagugguugaccuuccuccau

SEQ ID NO: 2153 - RNA, 25 nt, Artificial Sequence
  Description of Artificial Sequence: Synthetic oligonucleotide
uccccugguccuucccuucccuucc

SEQ ID NO: 2154 - RNA, 25 nt, Artificial Sequence
  Description of Artificial Sequence: Synthetic oligonucleotide
ccgaggcacagagagacagggcagg

SEQ ID NO: 2155 - RNA, 25 nt, Artificial Sequence
  Description of Artificial Sequence: Synthetic oligonucleotide
gauccacgugcccauuguggaggca

SEQ ID NO: 2156 - RNA, 25 nt, Artificial Sequence
  Description of Artificial Sequence: Synthetic oligonucleotide
agagaaaagagaaaguguuuuauau

SEQ ID NO: 2157 - RNA, 25 nt, Artificial Sequence
  Description of Artificial Sequence: Synthetic oligonucleotide
uacgguacuuauuuaauaucccuuu

SEQ ID NO: 2158 - RNA, 25 nt, Artificial Sequence
  Description of Artificial Sequence: Synthetic oligonucleotide
uuuaauuagaaauuaaaacaguuaa

SEQ ID NO: 2159 - RNA, 25 nt, Artificial Sequence
  Description of Artificial Sequence: Synthetic oligonucleotide
auuuaauuaaagaguaggguuuuuu

SEQ ID NO: 2160 - RNA, 25 nt, Artificial Sequence
  Description of Artificial Sequence: Synthetic oligonucleotide
uuucaguauucuugguuaauauuua

SEQ ID NO: 2161 - RNA, 25 nt, Artificial Sequence
  Description of Artificial Sequence: Synthetic oligonucleotide
aauuucaacuauuuaugagauguau

SEQ ID NO: 2162 - RNA, 25 nt, Artificial Sequence
  Description of Artificial Sequence: Synthetic oligonucleotide
ucuuuugcucucucuugcucucuua

SEQ ID NO: 2163 - RNA, 25 nt, Artificial Sequence
  Description of Artificial Sequence: Synthetic oligonucleotide
auuuguaccgguuuuuguauauaaa

SEQ ID NO: 2164 - RNA, 25 nt, Artificial Sequence
  Description of Artificial Sequence: Synthetic oligonucleotide
aauucauguuuccaaucucucucuc

SEQ ID NO: 2165 - RNA, 25 nt, Artificial Sequence
  Description of Artificial Sequence: Synthetic oligonucleotide
cccugaucggugacagucacuagcu

SEQ ID NO: 2166 - RNA, 25 nt, Artificial Sequence
  Description of Artificial Sequence: Synthetic oligonucleotide
uuaucuugaacagauauuuaauuuu

SEQ ID NO: 2167 - RNA, 25 nt, Artificial Sequence
  Description of Artificial Sequence: Synthetic oligonucleotide
ugcuaacacucagcucugcccuccc

SEQ ID NO: 2168 - RNA, 25 nt, Artificial Sequence
  Description of Artificial Sequence: Synthetic oligonucleotide
ccgauccccuggcuccccagcacac

SEQ ID NO: 2169 - RNA, 25 nt, Artificial Sequence
  Description of Artificial Sequence: Synthetic oligonucleotide
cauuccuuugaaauaagguuucaau

SEQ ID NO: 2170 - RNA, 25 nt, Artificial Sequence
  Description of Artificial Sequence: Synthetic oligonucleotide
uauacaucuacauacuauauauaua

SEQ ID NO: 2171 - RNA, 25 nt, Artificial Sequence
  Description of Artificial Sequence: Synthetic oligonucleotide
auuuggcaacuuguauuugugugua

SEQ ID NO: 2172 - RNA, 25 nt, Artificial Sequence
  Description of Artificial Sequence: Synthetic oligonucleotide
auauauauauauauauguuuaugua

SEQ ID NO: 2173 - RNA, 25 nt, Artificial Sequence
  Description of Artificial Sequence: Synthetic oligonucleotide
auauaugugauucugauaaaauaga

SEQ ID NO: 2174 - RNA, 25 nt, Artificial Sequence
  Description of Artificial Sequence: Synthetic oligonucleotide
acauugcuauucuguuuuuuauaug

SEQ ID NO: 2175 - RNA, 25 nt, Artificial Sequence
  Description of Artificial Sequence: Synthetic oligonucleotide
guaaaaacaaaacaagaaaaaauag

SEQ ID NO: 2176 - RNA, 25 nt, Artificial Sequence
  Description of Artificial Sequence: Synthetic oligonucleotide
gagaauucuacauacuaaaucucuc

SEQ ID NO: 2177 - RNA, 25 nt, Artificial Sequence
  Description of Artificial Sequence: Synthetic oligonucleotide
cuccuuuuuuaauuuuaauauuugu

SEQ ID NO: 2178 - RNA, 25 nt, Artificial Sequence
  Description of Artificial Sequence: Synthetic oligonucleotide
uuaucauuuauuuauuggugcuacu

SEQ ID NO: 2179 - RNA, 25 nt, Artificial Sequence
  Description of Artificial Sequence: Synthetic oligonucleotide
uguuuauccguaauaauugugggga

SEQ ID NO: 2180 - RNA, 25 nt, Artificial Sequence
  Description of Artificial Sequence: Synthetic oligonucleotide
aaaagauauuaacaucacgucuuug

SEQ ID NO: 2181 - RNA, 25 nt, Artificial Sequence
  Description of Artificial Sequence: Synthetic oligonucleotide
gucucuagugcaguuuuucgagaua

SEQ ID NO: 2182 - RNA, 25 nt, Artificial Sequence
  Description of Artificial Sequence: Synthetic oligonucleotide
auuccguaguacauauuuauuuuua

SEQ ID NO: 2183 - RNA, 25 nt, Artificial Sequence
  Description of Artificial Sequence: Synthetic oligonucleotide
aaacaacgacaaagaaauacagaua

SEQ ID NO: 2184 - RNA, 25 nt, Artificial Sequence
  Description of Artificial Sequence: Synthetic oligonucleotide
uuguauuaaagaauuuaauucugau

SEQ ID NO: 2185 - RNA, 25 nt, Artificial Sequence
  Description of Artificial Sequence: Synthetic oligonucleotide
caagacaagaaaaaugugacaagcc

SEQ ID NO: 2186 - RNA, 25 nt, Artificial Sequence
  Description of Artificial Sequence: Synthetic oligonucleotide
cgaggcggugagccgggcaggagga

SEQ ID NO: 2187 - RNA, 25 nt, Artificial Sequence
  Description of Artificial Sequence: Synthetic oligonucleotide
aaggagccucccucaggguuucggg

SEQ ID NO: 2188 - RNA, 25 nt, Artificial Sequence
  Description of Artificial Sequence: Synthetic oligonucleotide
gaaccagaucucucaccaggaaaga

SEQ ID NO: 2189 - RNA, 25 nt, Artificial Sequence
  Description of Artificial Sequence: Synthetic oligonucleotide
aaaccacgcugccgccaccacacca

SEQ ID NO: 2190 - RNA, 25 nt, Artificial Sequence
  Description of Artificial Sequence: Synthetic oligonucleotide
aucaccaucgacagaacaguccuua

SEQ ID NO: 2191 - RNA, 25 nt, Artificial Sequence
  Description of Artificial Sequence: Synthetic oligonucleotide
aauccagaaaccugaaaugaaggaa

SEQ ID NO: 2192 - RNA, 25 nt, Artificial Sequence
  Description of Artificial Sequence: Synthetic oligonucleotide
agaggagacucugcgcagagcacuu

SEQ ID NO: 2193 - RNA, 25 nt, Artificial Sequence
  Description of Artificial Sequence: Synthetic oligonucleotide
uuggguccggagggcgagacuccgg

SEQ ID NO: 2194 - RNA, 25 nt, Artificial Sequence
  Description of Artificial Sequence: Synthetic oligonucleotide
gcggaagcauucccgggcgggugac

SEQ ID NO: 2195 - RNA, 25 nt, Artificial Sequence
  Description of Artificial Sequence: Synthetic oligonucleotide
cccagcacggucccucuuggaauug

SEQ ID NO: 2196 - RNA, 25 nt, Artificial Sequence
  Description of Artificial Sequence: Synthetic oligonucleotide
ggauucgccauuuuauuuuucuugc

SEQ ID NO: 2197 - RNA, 25 nt, Artificial Sequence
  Description of Artificial Sequence: Synthetic oligonucleotide
cugcuaaaucaccgagcccggaaga

SEQ ID NO: 2198 - RNA, 25 nt, Artificial Sequence
  Description of Artificial Sequence: Synthetic oligonucleotide
auuagagaguuuuauuucugggauu

SEQ ID NO: 2199 - RNA, 25 nt, Artificial Sequence
  Description of Artificial Sequence: Synthetic oligonucleotide
uccuguagacacacccacccacaua

SEQ ID NO: 2200 - RNA, 25 nt, Artificial Sequence
  Description of Artificial Sequence: Synthetic oligonucleotide
acauacauuuauauauauauauauu

SEQ ID NO: 2201 - RNA, 25 nt, Artificial Sequence
  Description of Artificial Sequence: Synthetic oligonucleotide
uauauauauauaaaaauaaauaucu

SEQ ID NO: 2202 - RNA, 25 nt, Artificial Sequence
  Description of Artificial Sequence: Synthetic oligonucleotide
ucuauuuuauauauauaaaauauau

SEQ ID NO: 2203 - RNA, 25 nt, Artificial Sequence
  Description of Artificial Sequence: Synthetic oligonucleotide
uauauucuuuuuuuaaauuaacagu

SEQ ID NO: 2204 - RNA, 25 nt, Artificial Sequence
  Description of Artificial Sequence: Synthetic oligonucleotide
ugcuaauguuauuggugucuucacu

SEQ ID NO: 2205 - RNA, 25 nt, Artificial Sequence
  Description of Artificial Sequence: Synthetic oligonucleotide
uggauguauuugacugcuguggacu

SEQ ID NO: 2206 - RNA, 25 nt, Artificial Sequence
  Description of Artificial Sequence: Synthetic oligonucleotide
uugaguugggaggggaauguuccca

SEQ ID NO: 2207 - RNA, 25 nt, Artificial Sequence
  Description of Artificial Sequence: Synthetic oligonucleotide
acucagauccugacagggaagagga

SEQ ID NO: 2208 - RNA, 25 nt, Artificial Sequence
  Description of Artificial Sequence: Synthetic oligonucleotide
aggagaugagagacucuggcaugau

SEQ ID NO: 2209 - RNA, 25 nt, Artificial Sequence
  Description of Artificial Sequence: Synthetic oligonucleotide
ucuuuuuuuugucccacuugguggg

SEQ ID NO: 2210 - RNA, 25 nt, Artificial Sequence
  Description of Artificial Sequence: Synthetic oligonucleotide
ggccaggguccucuccccugcccag

SEQ ID NO: 2211 - RNA, 25 nt, Artificial Sequence
  Description of Artificial Sequence: Synthetic oligonucleotide
ggaaugugcaaggccagggcauggg

SEQ ID NO: 2212 - RNA, 25 nt, Artificial Sequence
  Description of Artificial Sequence: Synthetic oligonucleotide
gggcaaauaugacccaguuuuggga

SEQ ID NO: 2213 - RNA, 25 nt, Artificial Sequence
  Description of Artificial Sequence: Synthetic oligonucleotide
aacaccgacaaacccagcccuggcg

SEQ ID NO: 2214 - RNA, 25 nt, Artificial Sequence
  Description of Artificial Sequence: Synthetic oligonucleotide
gcugagccucucuaccccaggucag

SEQ ID NO: 2215 - RNA, 25 nt, Artificial Sequence
  Description of Artificial Sequence: Synthetic oligonucleotide
gacggacagaaagacagaucacagg

SEQ ID NO: 2216 - RNA, 25 nt, Artificial Sequence
  Description of Artificial Sequence: Synthetic oligonucleotide
guacagggaugaggacaccggcucu

SEQ ID NO: 2217 - RNA, 25 nt, Artificial Sequence
  Description of Artificial Sequence: Synthetic oligonucleotide
ugaccaggaguuuggggagcuucag

SEQ ID NO: 2218 - RNA, 25 nt, Artificial Sequence
  Description of Artificial Sequence: Synthetic oligonucleotide
ggacauugcugugcuuuggggauuc

SEQ ID NO: 2219 - RNA, 25 nt, Artificial Sequence
  Description of Artificial Sequence: Synthetic oligonucleotide
cccuccacaugcugcacgcgcaucu

SEQ ID NO: 2220 - RNA, 25 nt, Artificial Sequence
  Description of Artificial Sequence: Synthetic oligonucleotide
ucgcccccaggggcacugccuggaa

SEQ ID NO: 2221 - RNA, 25 nt, Artificial Sequence
  Description of Artificial Sequence: Synthetic oligonucleotide
agauucaggagccugggcggccuuc

SEQ ID NO: 2222 - RNA, 25 nt, Artificial Sequence
  Description of Artificial Sequence: Synthetic oligonucleotide
cgcuuacucucaccugcuucugagu

SEQ ID NO: 2223 - RNA, 25 nt, Artificial Sequence
  Description of Artificial Sequence: Synthetic oligonucleotide
uugcccaggagaccacuggcagaug

SEQ ID NO: 2224 - RNA, 25 nt, Artificial Sequence
  Description of Artificial Sequence: Synthetic oligonucleotide
gucccggcgaagagaagagacacau

SEQ ID NO: 2225 - RNA, 25 nt, Artificial Sequence
  Description of Artificial Sequence: Synthetic oligonucleotide
uuguuggaagaagcagcccaugaca

SEQ ID NO: 2226 - RNA, 25 nt, Artificial Sequence
  Description of Artificial Sequence: Synthetic oligonucleotide
agcuccccuuccugggacucgcccu

SEQ ID NO: 2227 - RNA, 25 nt, Artificial Sequence
  Description of Artificial Sequence: Synthetic oligonucleotide
ucauccucuuccugcuccccuuccu

SEQ ID NO: 2228 - RNA, 25 nt, Artificial Sequence
  Description of Artificial Sequence: Synthetic oligonucleotide
uggggugcagccuaaaaggaccuau

SEQ ID NO: 2229 - RNA, 25 nt, Artificial Sequence
  Description of Artificial Sequence: Synthetic oligonucleotide
uguccucacaccauugaaaccacua

SEQ ID NO: 2230 - RNA, 25 nt, Artificial Sequence
  Description of Artificial Sequence: Synthetic oligonucleotide
aguucuguccccccaggagaccugg

SEQ ID NO: 2231 - RNA, 25 nt, Artificial Sequence
  Description of Artificial Sequence: Synthetic oligonucleotide
guugugugugugugagugguugacc

SEQ ID NO: 2232 - RNA, 25 nt, Artificial Sequence
  Description of Artificial Sequence: Synthetic oligonucleotide
cuuccuccauccccugguccuuccc

SEQ ID NO: 2233 - RNA, 25 nt, Artificial Sequence
  Description of Artificial Sequence: Synthetic oligonucleotide
cuucccuucccgaggcacagagaga

SEQ ID NO: 2234 - RNA, 25 nt, Artificial Sequence
  Description of Artificial Sequence: Synthetic oligonucleotide
acagggcaggauccacgugcccauu

SEQ ID NO: 2235 - RNA, 25 nt, Artificial Sequence
  Description of Artificial Sequence: Synthetic oligonucleotide
uguggaggcagagaaaagagaaagu

SEQ ID NO: 2236 - RNA, 25 nt, Artificial Sequence
  Description of Artificial Sequence: Synthetic oligonucleotide
uguuuuauauacgguacuuauuuaa

SEQ ID NO: 2237 - RNA, 25 nt, Artificial Sequence
  Description of Artificial Sequence: Synthetic oligonucleotide
auaucccuuuuuaauuagaaauuaa

SEQ ID NO: 2238 - RNA, 25 nt, Artificial Sequence
  Description of Artificial Sequence: Synthetic oligonucleotide
aaacaguuaauuuaauuaaagagua

SEQ ID NO: 2239 - RNA, 25 nt, Artificial Sequence
  Description of Artificial Sequence: Synthetic oligonucleotide
aggguuuuuuuucaguauucuuggu

SEQ ID NO: 2240 - RNA, 25 nt, Artificial Sequence
  Description of Artificial Sequence: Synthetic oligonucleotide
uuaauauuuaauuucaacuauuuau

SEQ ID NO: 2241 - RNA, 25 nt, Artificial Sequence
  Description of Artificial Sequence: Synthetic oligonucleotide
ugagauguaucuuuugcucucucuu

SEQ ID NO: 2242 - RNA, 25 nt, Artificial Sequence
  Description of Artificial Sequence: Synthetic oligonucleotide
ugcucucuuauuuguaccgguuuuu

SEQ ID NO: 2243 - RNA, 25 nt, Artificial Sequence
  Description of Artificial Sequence: Synthetic oligonucleotide
uguauauaaaauucauguuuccaau

SEQ ID NO: 2244 - RNA, 25 nt, Artificial Sequence
  Description of Artificial Sequence: Synthetic oligonucleotide
ucucucucucccugaucggugacag

SEQ ID NO: 2245 - RNA, 25 nt, Artificial Sequence
  Description of Artificial Sequence: Synthetic oligonucleotide
gucacuagcuuaucuugaacagaua

SEQ ID NO: 2246 - RNA, 25 nt, Artificial Sequence
  Description of Artificial Sequence: Synthetic oligonucleotide
auuuaauuuugcuaacacucagcuc

SEQ ID NO: 2247 - RNA, 25 nt, Artificial Sequence
  Description of Artificial Sequence: Synthetic oligonucleotide
cugcccuccccgauccccuggcucc

SEQ ID NO: 2248 - RNA, 25 nt, Artificial Sequence
  Description of Artificial Sequence: Synthetic oligonucleotide
cccagcacacauuccuuugaaauaa

SEQ ID NO: 2249 - RNA, 25 nt, Artificial Sequence
  Description of Artificial Sequence: Synthetic oligonucleotide
agguuucaauauacaucuacauacu

SEQ ID NO: 2250 - RNA, 25 nt, Artificial Sequence
  Description of Artificial Sequence: Synthetic oligonucleotide
uauauauauauuuggcaacuuguau

SEQ ID NO: 2251 - RNA, 25 nt, Artificial Sequence
  Description of Artificial Sequence: Synthetic oligonucleotide
uuuguguguauauauauauauauau

SEQ ID NO: 2252 - RNA, 25 nt, Artificial Sequence
  Description of Artificial Sequence: Synthetic oligonucleotide
uguuuauguauauaugugauucuga

SEQ ID NO: 2253 - RNA, 25 nt, Artificial Sequence
  Description of Artificial Sequence: Synthetic oligonucleotide
auaaaauagacauugcuauucuguu

SEQ ID NO: 2254 - RNA, 25 nt, Artificial Sequence
  Description of Artificial Sequence: Synthetic oligonucleotide
uuuuuauauguaaaaacaaaacaag

SEQ ID NO: 2255 - RNA, 25 nt, Artificial Sequence
  Description of Artificial Sequence: Synthetic oligonucleotide
gaaaaaauagagaauucuacauacu

SEQ ID NO: 2256 - RNA, 25 nt, Artificial Sequence
  Description of Artificial Sequence: Synthetic oligonucleotide
uaaaucucucuccuuuuuuaauuuu

SEQ ID NO: 2257 - RNA, 25 nt, Artificial Sequence
  Description of Artificial Sequence: Synthetic oligonucleotide
uaauauuuguuaucauuuauuuauu

SEQ ID NO: 2258 - RNA, 25 nt, Artificial Sequence
  Description of Artificial Sequence: Synthetic oligonucleotide
uggugcuacuguuuauccguaauaa

SEQ ID NO: 2259 - RNA, 25 nt, Artificial Sequence
  Description of Artificial Sequence: Synthetic oligonucleotide
auuguggggaaaagauauuaacauc

SEQ ID NO: 2260 - RNA, 25 nt, Artificial Sequence
  Description of Artificial Sequence: Synthetic oligonucleotide
cacgucuuugucucuagugcaguuu

SEQ ID NO: 2261 - RNA, 25 nt, Artificial Sequence
  Description of Artificial Sequence: Synthetic oligonucleotide
uuucgagauauuccguaguacauau

SEQ ID NO: 2262 - RNA, 25 nt, Artificial Sequence
  Description of Artificial Sequence: Synthetic oligonucleotide
uuuauuuuuaaacaacgacaaagaa

SEQ ID NO: 2263 - RNA, 25 nt, Artificial Sequence
  Description of Artificial Sequence: Synthetic oligonucleotide
aauacagauauaucuuaaaaaaaaa

SEQ ID NO: 2264 - RNA, 25 nt, Artificial Sequence
  Description of Artificial Sequence: Synthetic oligonucleotide
aaaagcauuuuguauuaaagaauuu

SEQ ID NO: 2265 - RNA, 1172 nt, Homo sapiens
gcgaugcgggcgcccccggcgggcggccccggcgggcaccaugagcccucugcuccgccgccugcugcucgccgcacuccugcagcuggcccccgcccaggccccugucucccagccugaugccccuggccaccagaggaaaguggugucauggauagauguguauacucgcgcuaccugccagccccgggaggugguggugcccuugacuguggagcucaugggcaccguggccaaacagcuggugcccagcugcgugacugugcagcgcugugguggcugcugcccugacgauggccuggagugugugcccacugggcagcaccaaguccggaugcagauccucaugauccgguacccgagcagucagcugggggagaugucccuggaagaacacagccagugugaaugcagaccuaaaaaaaaggacagugcugugaagccagacagggcugccacuccccaccaccguccccagccccguucuguuccgggcugggacucugcccccggagcacccuccccagcugacaucacccaucccacuccagccccaggccccucugcccacgcugcacccagcaccaccagcgcccugacccccggaccugccgcugccgcugccgacgccgcagcuuccuccguugccaagggcggggcuuagagcucaacccagacaccugcaggugccggaagcugcgaaggugacacauggcuuuucagacucagcagggugacuugccucagaggcuauaucccagugggggaacaaagaggagccugguaaaaaacagccaagcccccaagaccucagcccaggcagaagcugcucuaggaccugggccucucagagggcucuucugccaucccuugucucccugaggccaucaucaaacaggacagaguuggaagaggagacugggaggcagcaagaggggucacauaccagcucaggggagaauggaguacugucucaguuucuaaccacucugugcaaguaagcaucuuacaacuggcucuuccuccccucacuaagaagacccaaaccucugcauaaugggauuugggcuuugguacaagaacugugacccccaacccugauaaaagagauggaaggaaaaaaaaaaaaaaaaaaaaaaaaaaaaaaaaaaaaaaaaaaaaaaaaaaaaaaa

SEQ ID NO: 2266 - RNA, 19 nt, Artificial Sequence
  Description of Artificial Sequence: Synthetic oligonucleotide
gcgaugcgggcgcccccgg

SEQ ID NO: 2267 - RNA, 19 nt, Artificial Sequence
  Description of Artificial Sequence: Synthetic oligonucleotide
gcgggcggccccggcgggc

SEQ ID NO: 2268 - RNA, 19 nt, Artificial Sequence
  Description of Artificial Sequence: Synthetic oligonucleotide
caccaugagcccucugcuc

SEQ ID NO: 2269 - RNA, 19 nt, Artificial Sequence
  Description of Artificial Sequence: Synthetic oligonucleotide
ccgccgccugcugcucgcc

SEQ ID NO: 2270 - RNA, 19 nt, Artificial Sequence
  Description of Artificial Sequence: Synthetic oligonucleotide
cgcacuccugcagcuggcc

SEQ ID NO: 2271 - RNA, 19 nt, Artificial Sequence
  Description of Artificial Sequence: Synthetic oligonucleotide
ccccgcccaggccccuguc

SEQ ID NO: 2272 - RNA, 19 nt, Artificial Sequence
  Description of Artificial Sequence: Synthetic oligonucleotide
cucccagccugaugccccu

SEQ ID NO: 2273 - RNA, 19 nt, Artificial Sequence
  Description of Artificial Sequence: Synthetic oligonucleotide
uggccaccagaggaaagug

SEQ ID NO: 2274 - RNA, 19 nt, Artificial Sequence
  Description of Artificial Sequence: Synthetic oligonucleotide
ggugucauggauagaugug

SEQ ID NO: 2275 - RNA, 19 nt, Artificial Sequence
  Description of Artificial Sequence: Synthetic oligonucleotide
guauacucgcgcuaccugc

SEQ ID NO: 2276 - RNA, 19 nt, Artificial Sequence
  Description of Artificial Sequence: Synthetic oligonucleotide
ccagccccgggagguggug

SEQ ID NO: 2277 - RNA, 19 nt, Artificial Sequence
  Description of Artificial Sequence: Synthetic oligonucleotide
ggugcccuugacuguggag

SEQ ID NO: 2278 - RNA, 19 nt, Artificial Sequence
  Description of Artificial Sequence: Synthetic oligonucleotide
gcucaugggcaccguggcc

SEQ ID NO: 2279 - RNA, 19 nt, Artificial Sequence
  Description of Artificial Sequence: Synthetic oligonucleotide
caaacagcuggugcccagc

SEQ ID NO: 2280 - RNA, 19 nt, Artificial Sequence
  Description of Artificial Sequence: Synthetic oligonucleotide
cugcgugacugugcagcgc

SEQ ID NO: 2281 - RNA, 19 nt, Artificial Sequence
  Description of Artificial Sequence: Synthetic oligonucleotide
cugugguggcugcugcccu

SEQ ID NO: 2282 - RNA, 19 nt, Artificial Sequence
  Description of Artificial Sequence: Synthetic oligonucleotide
ugacgauggccuggagugu

SEQ ID NO: 2283 - RNA, 19 nt, Artificial Sequence
  Description of Artificial Sequence: Synthetic oligonucleotide
ugugcccacugggcagcac

SEQ ID NO: 2284 - RNA, 19 nt, Artificial Sequence
  Description of Artificial Sequence: Synthetic oligonucleotide
ccaaguccggaugcagauc

SEQ ID NO: 2285 - RNA, 19 nt, Artificial Sequence
  Description of Artificial Sequence: Synthetic oligonucleotide
ccucaugauccgguacccg

SEQ ID NO: 2286 - RNA, 19 nt, Artificial Sequence
  Description of Artificial Sequence: Synthetic oligonucleotide
gagcagucagcugggggag

SEQ ID NO: 2287 - RNA, 19 nt, Artificial Sequence
  Description of Artificial Sequence: Synthetic oligonucleotide
gaugucccuggaagaacac

SEQ ID NO: 2288 - RNA, 19 nt, Artificial Sequence
  Description of Artificial Sequence: Synthetic oligonucleotide
cagccagugugaaugcaga

SEQ ID NO: 2289 - RNA, 19 nt, Artificial Sequence
  Description of Artificial Sequence: Synthetic oligonucleotide
accuaaaaaaaaggacagu

SEQ ID NO: 2290 - RNA, 19 nt, Artificial Sequence
  Description of Artificial Sequence: Synthetic oligonucleotide
ugcugugaagccagacagg

SEQ ID NO: 2291 - RNA, 19 nt, Artificial Sequence
  Description of Artificial Sequence: Synthetic oligonucleotide
ggcugccacuccccaccac

SEQ ID NO: 2292 - RNA, 19 nt, Artificial Sequence
  Description of Artificial Sequence: Synthetic oligonucleotide
ccguccccagccccguucu

SEQ ID NO: 2293 - RNA, 19 nt, Artificial Sequence
  Description of Artificial Sequence: Synthetic oligonucleotide
uguuccgggcugggacucu

SEQ ID NO: 2294 - RNA, 19 nt, Artificial Sequence
  Description of Artificial Sequence: Synthetic oligonucleotide
ugcccccggagcacccucc

SEQ ID NO: 2295 - RNA, 19 nt, Artificial Sequence
  Description of Artificial Sequence: Synthetic oligonucleotide
cccagcugacaucacccau

SEQ ID NO: 2296 - RNA, 19 nt, Artificial Sequence
  Description of Artificial Sequence: Synthetic oligonucleotide
ucccacuccagccccaggc

SEQ ID NO: 2297 - RNA, 19 nt, Artificial Sequence
  Description of Artificial Sequence: Synthetic oligonucleotide
ccccucugcccacgcugca

SEQ ID NO: 2298 - RNA, 19 nt, Artificial Sequence
  Description of Artificial Sequence: Synthetic oligonucleotide
acccagcaccaccagcgcc

SEQ ID NO: 2299 - RNA, 19 nt, Artificial Sequence
  Description of Artificial Sequence: Synthetic oligonucleotide
ccugacccccggaccugcc

SEQ ID NO: 2300 - RNA, 19 nt, Artificial Sequence
  Description of Artificial Sequence: Synthetic oligonucleotide
cgcugccgcugccgacgcc

SEQ ID NO: 2301 - RNA, 19 nt, Artificial Sequence
  Description of Artificial Sequence: Synthetic oligonucleotide
cgcagcuuccuccguugcc

SEQ ID NO: 2302 - RNA, 19 nt, Artificial Sequence
  Description of Artificial Sequence: Synthetic oligonucleotide
caagggcggggcuuagagc

SEQ ID NO: 2303 - RNA, 19 nt, Artificial Sequence
  Description of Artificial Sequence: Synthetic oligonucleotide
cucaacccagacaccugca

SEQ ID NO: 2304 - RNA, 19 nt, Artificial Sequence
  Description of Artificial Sequence: Synthetic oligonucleotide
aggugccggaagcugcgaa

SEQ ID NO: 2305 - RNA, 19 nt, Artificial Sequence
  Description of Artificial Sequence: Synthetic oligonucleotide
aggugacacauggcuuuuc

SEQ ID NO: 2306 - RNA, 19 nt, Artificial Sequence
  Description of Artificial Sequence: Synthetic oligonucleotide
cagacucagcagggugacu

SEQ ID NO: 2307 - RNA, 19 nt, Artificial Sequence
  Description of Artificial Sequence: Synthetic oligonucleotide
uugccucagaggcuauauc

SEQ ID NO: 2308 - RNA, 19 nt, Artificial Sequence
  Description of Artificial Sequence: Synthetic oligonucleotide
cccagugggggaacaaaga

SEQ ID NO: 2309 - RNA, 19 nt, Artificial Sequence
  Description of Artificial Sequence: Synthetic oligonucleotide
aggagccugguaaaaaaca

SEQ ID NO: 2310 - RNA, 19 nt, Artificial Sequence
  Description of Artificial Sequence: Synthetic oligonucleotide
agccaagcccccaagaccu

SEQ ID NO: 2311 - RNA, 19 nt, Artificial Sequence
  Description of Artificial Sequence: Synthetic oligonucleotide
ucagcccaggcagaagcug

SEQ ID NO: 2312 - RNA, 19 nt, Artificial Sequence
  Description of Artificial Sequence: Synthetic oligonucleotide
gcucuaggaccugggccuc

SEQ ID NO: 2313 - RNA, 19 nt, Artificial Sequence
  Description of Artificial Sequence: Synthetic oligonucleotide
cucagagggcucuucugcc

SEQ ID NO: 2314 - RNA, 19 nt, Artificial Sequence
  Description of Artificial Sequence: Synthetic oligonucleotide
caucccuugucucccugag

SEQ ID NO: 2315 - RNA, 19 nt, Artificial Sequence
  Description of Artificial Sequence: Synthetic oligonucleotide
ggccaucaucaaacaggac

SEQ ID NO: 2316 - RNA, 19 nt, Artificial Sequence
  Description of Artificial Sequence: Synthetic oligonucleotide
cagaguuggaagaggagac

SEQ ID NO: 2317 - RNA, 19 nt, Artificial Sequence
  Description of Artificial Sequence: Synthetic oligonucleotide
cugggaggcagcaagaggg

SEQ ID NO: 2318 - RNA, 19 nt, Artificial Sequence
  Description of Artificial Sequence: Synthetic oligonucleotide
ggucacauaccagcucagg

SEQ ID NO: 2319 - RNA, 19 nt, Artificial Sequence
  Description of Artificial Sequence: Synthetic oligonucleotide
gggagaauggaguacuguc

SEQ ID NO: 2320 - RNA, 19 nt, Artificial Sequence
  Description of Artificial Sequence: Synthetic oligonucleotide
cucaguuucuaaccacucu

SEQ ID NO: 2321 - RNA, 19 nt, Artificial Sequence
  Description of Artificial Sequence: Synthetic oligonucleotide
ugugcaaguaagcaucuua

SEQ ID NO: 2322 - RNA, 19 nt, Artificial Sequence
  Description of Artificial Sequence: Synthetic oligonucleotide
acaacuggcucuuccuccc

SEQ ID NO: 2323 - RNA, 19 nt, Artificial Sequence
  Description of Artificial Sequence: Synthetic oligonucleotide
ccucacuaagaagacccaa

SEQ ID NO: 2324 - RNA, 19 nt, Artificial Sequence
  Description of Artificial Sequence: Synthetic oligonucleotide
aaccucugcauaaugggau

SEQ ID NO: 2325 - RNA, 19 nt, Artificial Sequence
  Description of Artificial Sequence: Synthetic oligonucleotide
uuugggcuuugguacaaga

SEQ ID NO: 2326 - RNA, 19 nt, Artificial Sequence
  Description of Artificial Sequence: Synthetic oligonucleotide
aacugugacccccaacccu

SEQ ID NO: 2327 - RNA, 19 nt, Artificial Sequence
  Description of Artificial Sequence: Synthetic oligonucleotide
ugauaaaagagauggaagg

SEQ ID NO: 2328 - RNA, 25 nt, Artificial Sequence
  Description of Artificial Sequence: Synthetic oligonucleotide
gcgaugcgggcgcccccggcgggcg

SEQ ID NO: 2329 - RNA, 25 nt, Artificial Sequence
  Description of Artificial Sequence: Synthetic oligonucleotide
ggccccggcgggcaccaugagcccu

SEQ ID NO: 2330 - RNA, 25 nt, Artificial Sequence
  Description of Artificial Sequence: Synthetic oligonucleotide
ucugcuccgccgccugcugcucgcc

SEQ ID NO: 2331 - RNA, 25 nt, Artificial Sequence
  Description of Artificial Sequence: Synthetic oligonucleotide
cgcacuccugcagcuggcccccgcc

SEQ ID NO: 2332 - RNA, 25 nt, Artificial Sequence
  Description of Artificial Sequence: Synthetic oligonucleotide
ccaggccccugucucccagccugau

SEQ ID NO: 2333 - RNA, 25 nt, Artificial Sequence
  Description of Artificial Sequence: Synthetic oligonucleotide
ugccccuggccaccagaggaaagug

SEQ ID NO: 2334 - RNA, 25 nt, Artificial Sequence
  Description of Artificial Sequence: Synthetic oligonucleotide
ggugucauggauagauguguauacu

SEQ ID NO: 2335 - RNA, 25 nt, Artificial Sequence
  Description of Artificial Sequence: Synthetic oligonucleotide
ucgcgcuaccugccagccccgggag

SEQ ID NO: 2336 - RNA, 25 nt, Artificial Sequence
  Description of Artificial Sequence: Synthetic oligonucleotide
ggugguggugcccuugacuguggag

SEQ ID NO: 2337 - RNA, 25 nt, Artificial Sequence
  Description of Artificial Sequence: Synthetic oligonucleotide
gcucaugggcaccguggccaaacag

SEQ ID NO: 2338 - RNA, 25 nt, Artificial Sequence
  Description of Artificial Sequence: Synthetic oligonucleotide
gcuggugcccagcugcgugacugug

SEQ ID NO: 2339 - RNA, 25 nt, Artificial Sequence
  Description of Artificial Sequence: Synthetic oligonucleotide
gcagcgcugugguggcugcugcccu

SEQ ID NO: 2340 - RNA, 25 nt, Artificial Sequence
  Description of Artificial Sequence: Synthetic oligonucleotide
ugacgauggccuggagugugugccc

SEQ ID NO: 2341 - RNA, 25 nt, Artificial Sequence
  Description of Artificial Sequence: Synthetic oligonucleotide
cacugggcagcaccaaguccggaug

SEQ ID NO: 2342 - RNA, 25 nt, Artificial Sequence
  Description of Artificial Sequence: Synthetic oligonucleotide
gcagauccucaugauccgguacccg

SEQ ID NO: 2343 - RNA, 25 nt, Artificial Sequence
  Description of Artificial Sequence: Synthetic oligonucleotide
gagcagucagcugggggagaugucc

SEQ ID NO: 2344 - RNA, 25 nt, Artificial Sequence
  Description of Artificial Sequence: Synthetic oligonucleotide
ccuggaagaacacagccagugugaa

SEQ ID NO: 2345 - RNA, 25 nt, Artificial Sequence
  Description of Artificial Sequence: Synthetic oligonucleotide
augcagaccuaaaaaaaaggacagu

SEQ ID NO: 2346 - RNA, 25 nt, Artificial Sequence
  Description of Artificial Sequence: Synthetic oligonucleotide
ugcugugaagccagacagggcugcc

SEQ ID NO: 2347 - RNA, 25 nt, Artificial Sequence
  Description of Artificial Sequence: Synthetic oligonucleotide
cacuccccaccaccguccccagccc

SEQ ID NO: 2348 - RNA, 25 nt, Artificial Sequence
  Description of Artificial Sequence: Synthetic oligonucleotide
ccguucuguuccgggcugggacucu

SEQ ID NO: 2349 - RNA, 25 nt, Artificial Sequence
  Description of Artificial Sequence: Synthetic oligonucleotide
ugcccccggagcacccuccccagcu

SEQ ID NO: 2350 - RNA, 25 nt, Artificial Sequence
  Description of Artificial Sequence: Synthetic oligonucleotide
ugacaucacccaucccacuccagcc

SEQ ID NO: 2351 - RNA, 25 nt, Artificial Sequence
  Description of Artificial Sequence: Synthetic oligonucleotide
cccaggccccucugcccacgcugca

SEQ ID NO: 2352 - RNA, 25 nt, Artificial Sequence
  Description of Artificial Sequence: Synthetic oligonucleotide
acccagcaccaccagcgcccugacc

SEQ ID NO: 2353 - RNA, 25 nt, Artificial Sequence
  Description of Artificial Sequence: Synthetic oligonucleotide
ccccggaccugccgcugccgcugcc

SEQ ID NO: 2354 - RNA, 25 nt, Artificial Sequence
  Description of Artificial Sequence: Synthetic oligonucleotide
cgacgccgcagcuuccuccguugcc

SEQ ID NO: 2355 - RNA, 25 nt, Artificial Sequence
  Description of Artificial Sequence: Synthetic oligonucleotide
caagggcggggcuuagagcucaacc

SEQ ID NO: 2356 - RNA, 25 nt, Artificial Sequence
  Description of Artificial Sequence: Synthetic oligonucleotide
ccagacaccugcaggugccggaagc

SEQ ID NO: 2357 - RNA, 25 nt, Artificial Sequence
  Description of Artificial Sequence: Synthetic oligonucleotide
cugcgaaggugacacauggcuuuuc

SEQ ID NO: 2358 - RNA, 25 nt, Artificial Sequence
  Description of Artificial Sequence: Synthetic oligonucleotide
cagacucagcagggugacuugccuc

SEQ ID NO: 2359 - RNA, 25 nt, Artificial Sequence
  Description of Artificial Sequence: Synthetic oligonucleotide
cagaggcuauaucccagugggggaa

SEQ ID NO: 2360 - RNA, 25 nt, Artificial Sequence
  Description of Artificial Sequence: Synthetic oligonucleotide
acaaagaggagccugguaaaaaaca

SEQ ID NO: 2361 - RNA, 25 nt, Artificial Sequence
  Description of Artificial Sequence: Synthetic oligonucleotide
agccaagcccccaagaccucagccc

SEQ ID NO: 2362 - RNA, 25 nt, Artificial Sequence
  Description of Artificial Sequence: Synthetic oligonucleotide
caggcagaagcugcucuaggaccug

SEQ ID NO: 2363 - RNA, 25 nt, Artificial Sequence
  Description of Artificial Sequence: Synthetic oligonucleotide
gggccucucagagggcucuucugcc

SEQ ID NO: 2364 - RNA, 25 nt, Artificial Sequence
  Description of Artificial Sequence: Synthetic oligonucleotide
caucccuugucucccugaggccauc

SEQ ID NO: 2365 - RNA, 25 nt, Artificial Sequence
  Description of Artificial Sequence: Synthetic oligonucleotide
caucaaacaggacagaguuggaaga

SEQ ID NO: 2366 - RNA, 25 nt, Artificial Sequence
  Description of Artificial Sequence: Synthetic oligonucleotide
aggagacugggaggcagcaagaggg

SEQ ID NO: 2367 - RNA, 25 nt, Artificial Sequence
  Description of Artificial Sequence: Synthetic oligonucleotide
ggucacauaccagcucaggggagaa

SEQ ID NO: 2368 - RNA, 25 nt, Artificial Sequence
  Description of Artificial Sequence: Synthetic oligonucleotide
auggaguacugucucaguuucuaac

SEQ ID NO: 2369 - RNA, 25 nt, Artificial Sequence
  Description of Artificial Sequence: Synthetic oligonucleotide
ccacucugugcaaguaagcaucuua

SEQ ID NO: 2370 - RNA, 25 nt, Artificial Sequence
  Description of Artificial Sequence: Synthetic oligonucleotide
acaacuggcucuuccuccccucacu

SEQ ID NO: 2371 - RNA, 25 nt, Artificial Sequence
  Description of Artificial Sequence: Synthetic oligonucleotide
uaagaagacccaaaccucugcauaa

SEQ ID NO: 2372 - RNA, 25 nt, Artificial Sequence
  Description of Artificial Sequence: Synthetic oligonucleotide
augggauuugggcuuugguacaaga

SEQ ID NO: 2373 - RNA, 25 nt, Artificial Sequence
  Description of Artificial Sequence: Synthetic oligonucleotide
aacugugacccccaacccugauaaa

SEQ ID NO: 2374 - RNA, 2076 nt, Homo sapiens
cggggaaggggagggaggagggggacgagggcucuggcggguuuggaggggcugaacaucgcgggguguucuggugucccccgccccgccucuccaaaaagcuacaccgacgcggaccgcggcggcguccucccucgcccucgcuucaccucgcgggcuccgaaugcggggagcucggauguccgguuuccugugaggcuuuuaccugacacccgccgccuuuccccggcacuggcugggagggcgcccugcaaaguugggaacgcggagccccggacccgcucccgccgccuccggcucgcccagggggggucgccgggaggagcccgggggagagggaccaggaggggcccgcggccucgcaggggcgcccgcgcccccaccccugcccccgccagcggaccggucccccacccccgguccuuccaccaugcacuugcugggcuucuucucuguggcguguucucugcucgccgcugcgcugcucccggguccucgcgaggcgcccgccgccgccgccgccuucgaguccggacucgaccucucggacgcggagcccgacgcgggcgaggccacggcuuaugcaagcaaagaucuggaggagcaguuacggucuguguccaguguagaugaacucaugacuguacucuacccagaauauuggaaaauguacaagugucagcuaaggaaaggaggcuggcaacauaacagagaacaggccaaccucaacucaaggacagaagagacuauaaaauuugcugcagcacauuauaauacagagaucuugaaaaguauugauaaugaguggagaaagacucaaugcaugccacgggagguguguauagauguggggaaggaguuuggagucgcgacaaacaccuucuuuaaaccuccauguguguccgucuacagauguggggguugcugcaauagugaggggcugcagugcaugaacaccagcacgagcuaccucagcaagacguuauuugaaauuacagugccucucucucaaggccccaaaccaguaacaaucaguuuugccaaucacacuuccugccgaugcaugucuaaacuggauguuuacagacaaguucauuccauuauuagacguucccugccagcaacacuaccacagugucaggcagcgaacaagaccugccccaccaauuacauguggaauaaucacaucugcagaugccuggcucaggaagauuuuauguuuuccucggaugcuggagaugacucaacagauggauuccaugacaucuguggaccaaacaaggagcuggaugaagagaccugucagugugucugcagagcggggcuucggccugccagcuguggaccccacaaagaacuagacagaaacucaugccagugugucuguaaaaacaaacucuuccccagccaauguggggccaaccgagaauuugaugaaaacacaugccaguguguauguaaaagaaccugccccagaaaucaaccccuaaauccuggaaaaugugccugugaauguacagaaaguccacagaaaugcuuguuaaaaggaaagaaguuccaccaccaaacaugcagcuguuacagacggccauguacgaaccgccagaaggcuugugagccaggauuuucauauagugaagaagugugucguugugucccuucauauuggaaaagaccacaaaugagcuaagauuguacuguuuuccaguucaucgauuuucuauuauggaaaacuguguugccacaguagaacugucugugaacagagagacccuuguggguccaugcuaacaaagacaaaagucugucuuuccugaaccauguggauaacuuuacagaaauggacuggagcucaucugcaaaaggccucuuguaaagacugguuuucugccaaugaccaaacagccaagauuuuccucuugugauuucuuuaaaagaaugacuauauaauuuauuuccacuaaaaauauuguuucugcauucauuuuuauagcaacaacaauugguaaaacucacugugaucaauauuuuuauaucaugcaaaauauguuuaaaauaaaaugaaaauuguauuau

SEQ ID NO: 2375 - RNA, 19 nt, Artificial Sequence
  Description of Artificial Sequence: Synthetic oligonucleotide
cggggaaggggagggagga

SEQ ID NO: 2376 - RNA, 19 nt, Artificial Sequence
  Description of Artificial Sequence: Synthetic oligonucleotide
agggggacgagggcucugg

SEQ ID NO: 2377 - RNA, 19 nt, Artificial Sequence
  Description of Artificial Sequence: Synthetic oligonucleotide
gcggguuuggaggggcuga

SEQ ID NO: 2378 - RNA, 19 nt, Artificial Sequence
  Description of Artificial Sequence: Synthetic oligonucleotide
aacaucgcgggguguucug

SEQ ID NO: 2379 - RNA, 19 nt, Artificial Sequence
  Description of Artificial Sequence: Synthetic oligonucleotide
ggugucccccgccccgccu

SEQ ID NO: 2380 - RNA, 19 nt, Artificial Sequence
  Description of Artificial Sequence: Synthetic oligonucleotide
ucuccaaaaagcuacaccg

SEQ ID NO: 2381 - RNA, 19 nt, Artificial Sequence
  Description of Artificial Sequence: Synthetic oligonucleotide
gacgcggaccgcggcggcg

SEQ ID NO: 2382 - RNA, 19 nt, Artificial Sequence
  Description of Artificial Sequence: Synthetic oligonucleotide
guccucccucgcccucgcu

SEQ ID NO: 2383 - RNA, 19 nt, Artificial Sequence
  Description of Artificial Sequence: Synthetic oligonucleotide
uucaccucgcgggcuccga

SEQ ID NO: 2384 - RNA, 19 nt, Artificial Sequence
  Description of Artificial Sequence: Synthetic oligonucleotide
aaugcggggagcucggaug

SEQ ID NO: 2385 - RNA, 19 nt, Artificial Sequence
  Description of Artificial Sequence: Synthetic oligonucleotide
guccgguuuccugugaggc

SEQ ID NO: 2386 - RNA, 19 nt, Artificial Sequence
  Description of Artificial Sequence: Synthetic oligonucleotide
cuuuuaccugacacccgcc

SEQ ID NO: 2387 - RNA, 19 nt, Artificial Sequence
  Description of Artificial Sequence: Synthetic oligonucleotide
cgccuuuccccggcacugg

SEQ ID NO: 2388 - RNA, 19 nt, Artificial Sequence
  Description of Artificial Sequence: Synthetic oligonucleotide
gcugggagggcgcccugca

SEQ ID NO: 2389 - RNA, 19 nt, Artificial Sequence
  Description of Artificial Sequence: Synthetic oligonucleotide
aaaguugggaacgcggagc

SEQ ID NO: 2390 - RNA, 19 nt, Artificial Sequence
  Description of Artificial Sequence: Synthetic oligonucleotide
ccccggacccgcucccgcc

SEQ ID NO: 2391 - RNA, 19 nt, Artificial Sequence
  Description of Artificial Sequence: Synthetic oligonucleotide
cgccuccggcucgcccagg

SEQ ID NO: 2392 - RNA, 19 nt, Artificial Sequence
  Description of Artificial Sequence: Synthetic oligonucleotide
ggggggucgccgggaggag

SEQ ID NO: 2393 - RNA, 19 nt, Artificial Sequence
  Description of Artificial Sequence: Synthetic oligonucleotide
gcccgggggagagggacca

SEQ ID NO: 2394 - RNA, 19 nt, Artificial Sequence
  Description of Artificial Sequence: Synthetic oligonucleotide
aggaggggcccgcggccuc

SEQ ID NO: 2395 - RNA, 19 nt, Artificial Sequence
  Description of Artificial Sequence: Synthetic oligonucleotide
cgcaggggcgcccgcgccc

SEQ ID NO: 2396 - RNA, 19 nt, Artificial Sequence
  Description of Artificial Sequence: Synthetic oligonucleotide
cccaccccugcccccgcca

SEQ ID NO: 2397 - RNA, 19 nt, Artificial Sequence
  Description of Artificial Sequence: Synthetic oligonucleotide
agcggaccggucccccacc

SEQ ID NO: 2398 - RNA, 19 nt, Artificial Sequence
  Description of Artificial Sequence: Synthetic oligonucleotide
ccccgguccuuccaccaug

SEQ ID NO: 2399 - RNA, 19 nt, Artificial Sequence
  Description of Artificial Sequence: Synthetic oligonucleotide
gcacuugcugggcuucuuc

SEQ ID NO: 2400 - RNA, 19 nt, Artificial Sequence
  Description of Artificial Sequence: Synthetic oligonucleotide
cucuguggcguguucucug

SEQ ID NO: 2401 - RNA, 19 nt, Artificial Sequence
  Description of Artificial Sequence: Synthetic oligonucleotide
gcucgccgcugcgcugcuc

SEQ ID NO: 2402 - RNA, 19 nt, Artificial Sequence
  Description of Artificial Sequence: Synthetic oligonucleotide
cccggguccucgcgaggcg

SEQ ID NO: 2403 - RNA, 19 nt, Artificial Sequence
  Description of Artificial Sequence: Synthetic oligonucleotide
gcccgccgccgccgccgcc

SEQ ID NO: 2404 - RNA, 19 nt, Artificial Sequence
  Description of Artificial Sequence: Synthetic oligonucleotide
cuucgaguccggacucgac

SEQ ID NO: 2405 - RNA, 19 nt, Artificial Sequence
  Description of Artificial Sequence: Synthetic oligonucleotide
ccucucggacgcggagccc

SEQ ID NO: 2406 - RNA, 19 nt, Artificial Sequence
  Description of Artificial Sequence: Synthetic oligonucleotide
cgacgcgggcgaggccacg

SEQ ID NO: 2407 - RNA, 19 nt, Artificial Sequence
  Description of Artificial Sequence: Synthetic oligonucleotide
ggcuuaugcaagcaaagau

SEQ ID NO: 2408 - RNA, 19 nt, Artificial Sequence
  Description of Artificial Sequence: Synthetic oligonucleotide
ucuggaggagcaguuacgg

SEQ ID NO: 2409 - RNA, 19 nt, Artificial Sequence
  Description of Artificial Sequence: Synthetic oligonucleotide
gucuguguccaguguagau

SEQ ID NO: 2410 - RNA, 19 nt, Artificial Sequence
  Description of Artificial Sequence: Synthetic oligonucleotide
ugaacucaugacuguacuc

SEQ ID NO: 2411 - RNA, 19 nt, Artificial Sequence
  Description of Artificial Sequence: Synthetic oligonucleotide
cuacccagaauauuggaaa

SEQ ID NO: 2412 - RNA, 19 nt, Artificial Sequence
  Description of Artificial Sequence: Synthetic oligonucleotide
aauguacaagugucagcua

SEQ ID NO: 2413 - RNA, 19 nt, Artificial Sequence
  Description of Artificial Sequence: Synthetic oligonucleotide
aaggaaaggaggcuggcaa

SEQ ID NO: 2414 - RNA, 19 nt, Artificial Sequence
  Description of Artificial Sequence: Synthetic oligonucleotide
acauaacagagaacaggcc

SEQ ID NO: 2415 - RNA, 19 nt, Artificial Sequence
  Description of Artificial Sequence: Synthetic oligonucleotide
caaccucaacucaaggaca

SEQ ID NO: 2416 - RNA, 19 nt, Artificial Sequence
  Description of Artificial Sequence: Synthetic oligonucleotide
agaagagacuauaaaauuu

SEQ ID NO: 2417 - RNA, 19 nt, Artificial Sequence
  Description of Artificial Sequence: Synthetic oligonucleotide
ugcugcagcacauuauaau

SEQ ID NO: 2418 - RNA, 19 nt, Artificial Sequence
  Description of Artificial Sequence: Synthetic oligonucleotide
uacagagaucuugaaaagu

SEQ ID NO: 2419 - RNA, 19 nt, Artificial Sequence
  Description of Artificial Sequence: Synthetic oligonucleotide
uauugauaaugaguggaga

SEQ ID NO: 2420 - RNA, 19 nt, Artificial Sequence
  Description of Artificial Sequence: Synthetic oligonucleotide
aaagacucaaugcaugcca

SEQ ID NO: 2421 - RNA, 19 nt, Artificial Sequence
  Description of Artificial Sequence: Synthetic oligonucleotide
acgggagguguguauagau

SEQ ID NO: 2422 - RNA, 19 nt, Artificial Sequence
  Description of Artificial Sequence: Synthetic oligonucleotide
uguggggaaggaguuugga

SEQ ID NO: 2423 - RNA, 19 nt, Artificial Sequence
  Description of Artificial Sequence: Synthetic oligonucleotide
agucgcgacaaacaccuuc

SEQ ID NO: 2424 - RNA, 19 nt, Artificial Sequence
  Description of Artificial Sequence: Synthetic oligonucleotide
cuuuaaaccuccaugugug

SEQ ID NO: 2425 - RNA, 19 nt, Artificial Sequence
  Description of Artificial Sequence: Synthetic oligonucleotide
guccgucuacagauguggg

SEQ ID NO: 2426 - RNA, 19 nt, Artificial Sequence
  Description of Artificial Sequence: Synthetic oligonucleotide
ggguugcugcaauagugag

SEQ ID NO: 2427 - RNA, 19 nt, Artificial Sequence
  Description of Artificial Sequence: Synthetic oligonucleotide
ggggcugcagugcaugaac

SEQ ID NO: 2428 - RNA, 19 nt, Artificial Sequence
  Description of Artificial Sequence: Synthetic oligonucleotide
caccagcacgagcuaccuc

SEQ ID NO: 2429 - RNA, 19 nt, Artificial Sequence
  Description of Artificial Sequence: Synthetic oligonucleotide
cagcaagacguuauuugaa

SEQ ID NO: 2430 - RNA, 19 nt, Artificial Sequence
  Description of Artificial Sequence: Synthetic oligonucleotide
aauuacagugccucucucu

SEQ ID NO: 2431 - RNA, 19 nt, Artificial Sequence
  Description of Artificial Sequence: Synthetic oligonucleotide
ucaaggccccaaaccagua

SEQ ID NO: 2432 - RNA, 19 nt, Artificial Sequence
  Description of Artificial Sequence: Synthetic oligonucleotide
aacaaucaguuuugccaau

SEQ ID NO: 2433 - RNA, 19 nt, Artificial Sequence
  Description of Artificial Sequence: Synthetic oligonucleotide
ucacacuuccugccgaugc

SEQ ID NO: 2434 - RNA, 19 nt, Artificial Sequence
  Description of Artificial Sequence: Synthetic oligonucleotide
caugucuaaacuggauguu

SEQ ID NO: 2435 - RNA, 19 nt, Artificial Sequence
  Description of Artificial Sequence: Synthetic oligonucleotide
uuacagacaaguucauucc

SEQ ID NO: 2436 - RNA, 19 nt, Artificial Sequence
  Description of Artificial Sequence: Synthetic oligonucleotide
cauuauuagacguucccug

SEQ ID NO: 2437 - RNA, 19 nt, Artificial Sequence
  Description of Artificial Sequence: Synthetic oligonucleotide
gccagcaacacuaccacag

SEQ ID NO: 2438 - RNA, 19 nt, Artificial Sequence
  Description of Artificial Sequence: Synthetic oligonucleotide
gugucaggcagcgaacaag

SEQ ID NO: 2439 - RNA, 19 nt, Artificial Sequence
  Description of Artificial Sequence: Synthetic oligonucleotide
gaccugccccaccaauuac

SEQ ID NO: 2440 - RNA, 19 nt, Artificial Sequence
  Description of Artificial Sequence: Synthetic oligonucleotide
cauguggaauaaucacauc

SEQ ID NO: 2441 - RNA, 19 nt, Artificial Sequence
  Description of Artificial Sequence: Synthetic oligonucleotide
cugcagaugccuggcucag

SEQ ID NO: 2442 - RNA, 19 nt, Artificial Sequence
  Description of Artificial Sequence: Synthetic oligonucleotide
ggaagauuuuauguuuucc

SEQ ID NO: 2443 - RNA, 19 nt, Artificial Sequence
  Description of Artificial Sequence: Synthetic oligonucleotide
cucggaugcuggagaugac

SEQ ID NO: 2444 - RNA, 19 nt, Artificial Sequence
  Description of Artificial Sequence: Synthetic oligonucleotide
cucaacagauggauuccau

SEQ ID NO: 2445 - RNA, 19 nt, Artificial Sequence
  Description of Artificial Sequence: Synthetic oligonucleotide
ugacaucuguggaccaaac

SEQ ID NO: 2446 - RNA, 19 nt, Artificial Sequence
  Description of Artificial Sequence: Synthetic oligonucleotide
caaggagcuggaugaagag

SEQ ID NO: 2447 - RNA, 19 nt, Artificial Sequence
  Description of Artificial Sequence: Synthetic oligonucleotide
gaccugucagugugucugc

SEQ ID NO: 2448 - RNA, 19 nt, Artificial Sequence
  Description of Artificial Sequence: Synthetic oligonucleotide
cagagcggggcuucggccu

SEQ ID NO: 2449 - RNA, 19 nt, Artificial Sequence
  Description of Artificial Sequence: Synthetic oligonucleotide
ugccagcuguggaccccac

SEQ ID NO: 2450 - RNA, 19 nt, Artificial Sequence
  Description of Artificial Sequence: Synthetic oligonucleotide
caaagaacuagacagaaac

SEQ ID NO: 2451 - RNA, 19 nt, Artificial Sequence
  Description of Artificial Sequence: Synthetic oligonucleotide
cucaugccagugugucugu

SEQ ID NO: 2452 - RNA, 19 nt, Artificial Sequence
  Description of Artificial Sequence: Synthetic oligonucleotide
uaaaaacaaacucuucccc

SEQ ID NO: 2453 - RNA, 19 nt, Artificial Sequence
  Description of Artificial Sequence: Synthetic oligonucleotide
cagccaauguggggccaac

SEQ ID NO: 2454 - RNA, 19 nt, Artificial Sequence
  Description of Artificial Sequence: Synthetic oligonucleotide
ccgagaauuugaugaaaac

SEQ ID NO: 2455 - RNA, 19 nt, Artificial Sequence
  Description of Artificial Sequence: Synthetic oligonucleotide
cacaugccaguguguaugu

SEQ ID NO: 2456 - RNA, 19 nt, Artificial Sequence
  Description of Artificial Sequence: Synthetic oligonucleotide
uaaaagaaccugccccaga

SEQ ID NO: 2457 - RNA, 19 nt, Artificial Sequence
  Description of Artificial Sequence: Synthetic oligonucleotide
aaaucaaccccuaaauccu

SEQ ID NO: 2458 - RNA, 19 nt, Artificial Sequence
  Description of Artificial Sequence: Synthetic oligonucleotide
uggaaaaugugccugugaa

SEQ ID NO: 2459 - RNA, 19 nt, Artificial Sequence
  Description of Artificial Sequence: Synthetic oligonucleotide
auguacagaaaguccacag

SEQ ID NO: 2460 - RNA, 19 nt, Artificial Sequence
  Description of Artificial Sequence: Synthetic oligonucleotide
gaaaugcuuguuaaaagga

SEQ ID NO: 2461 - RNA, 19 nt, Artificial Sequence
  Description of Artificial Sequence: Synthetic oligonucleotide
aaagaaguuccaccaccaa

SEQ ID NO: 2462 - RNA, 19 nt, Artificial Sequence
  Description of Artificial Sequence: Synthetic oligonucleotide
aacaugcagcuguuacaga

SEQ ID NO: 2463 - RNA, 19 nt, Artificial Sequence
  Description of Artificial Sequence: Synthetic oligonucleotide
acggccauguacgaaccgc

SEQ ID NO: 2464 - RNA, 19 nt, Artificial Sequence
  Description of Artificial Sequence: Synthetic oligonucleotide
ccagaaggcuugugagcca

SEQ ID NO: 2465 - RNA, 19 nt, Artificial Sequence
  Description of Artificial Sequence: Synthetic oligonucleotide
aggauuuucauauagugaa

SEQ ID NO: 2466 - RNA, 19 nt, Artificial Sequence
  Description of Artificial Sequence: Synthetic oligonucleotide
agaagugugucguuguguc

SEQ ID NO: 2467 - RNA, 19 nt, Artificial Sequence
  Description of Artificial Sequence: Synthetic oligonucleotide
cccuucauauuggaaaaga

SEQ ID NO: 2468 - RNA, 19 nt, Artificial Sequence
  Description of Artificial Sequence: Synthetic oligonucleotide
accacaaaugagcuaagau

SEQ ID NO: 2469 - RNA, 19 nt, Artificial Sequence
  Description of Artificial Sequence: Synthetic oligonucleotide
uuguacuguuuuccaguuc

SEQ ID NO: 2470 - RNA, 19 nt, Artificial Sequence
  Description of Artificial Sequence: Synthetic oligonucleotide
caucgauuuucuauuaugg

SEQ ID NO: 2471 - RNA, 19 nt, Artificial Sequence
  Description of Artificial Sequence: Synthetic oligonucleotide
gaaaacuguguugccacag

SEQ ID NO: 2472 - RNA, 19 nt, Artificial Sequence
  Description of Artificial Sequence: Synthetic oligonucleotide
guagaacugucugugaaca

SEQ ID NO: 2473 - RNA, 19 nt, Artificial Sequence
  Description of Artificial Sequence: Synthetic oligonucleotide
agagagacccuuguggguc

SEQ ID NO: 2474 - RNA, 19 nt, Artificial Sequence
  Description of Artificial Sequence: Synthetic oligonucleotide
ccaugcuaacaaagacaaa

SEQ ID NO: 2475 - RNA, 19 nt, Artificial Sequence
  Description of Artificial Sequence: Synthetic oligonucleotide
aagucugucuuuccugaac

SEQ ID NO: 2476 - RNA, 19 nt, Artificial Sequence
  Description of Artificial Sequence: Synthetic oligonucleotide
ccauguggauaacuuuaca

SEQ ID NO: 2477 - RNA, 19 nt, Artificial Sequence
  Description of Artificial Sequence: Synthetic oligonucleotide
agaaauggacuggagcuca

SEQ ID NO: 2478 - RNA, 19 nt, Artificial Sequence
  Description of Artificial Sequence: Synthetic oligonucleotide
aucugcaaaaggccucuug

SEQ ID NO: 2479 - RNA, 19 nt, Artificial Sequence
  Description of Artificial Sequence: Synthetic oligonucleotide
guaaagacugguuuucugc

SEQ ID NO: 2480 - RNA, 19 nt, Artificial Sequence
  Description of Artificial Sequence: Synthetic oligonucleotide
ccaaugaccaaacagccaa

SEQ ID NO: 2481 - RNA, 19 nt, Artificial Sequence
  Description of Artificial Sequence: Synthetic oligonucleotide
agauuuuccucuugugauu

SEQ ID NO: 2482 - RNA, 19 nt, Artificial Sequence
  Description of Artificial Sequence: Synthetic oligonucleotide
uucuuuaaaagaaugacua

SEQ ID NO: 2483 - RNA, 19 nt, Artificial Sequence
  Description of Artificial Sequence: Synthetic oligonucleotide
auauaauuuauuuccacua

SEQ ID NO: 2484 - RNA, 19 nt, Artificial Sequence
  Description of Artificial Sequence: Synthetic oligonucleotide
aaaaauauuguuucugcau

SEQ ID NO: 2485 - RNA, 19 nt, Artificial Sequence
  Description of Artificial Sequence: Synthetic oligonucleotide
uucauuuuuauagcaacaa

SEQ ID NO: 2486 - RNA, 19 nt, Artificial Sequence
  Description of Artificial Sequence: Synthetic oligonucleotide
acaauugguaaaacucacu

SEQ ID NO: 2487 - RNA, 19 nt, Artificial Sequence
  Description of Artificial Sequence: Synthetic oligonucleotide
ugugaucaauauuuuuaua

SEQ ID NO: 2488 - RNA, 19 nt, Artificial Sequence
  Description of Artificial Sequence: Synthetic oligonucleotide
aucaugcaaaauauguuua

SEQ ID NO: 2489 - RNA, 19 nt, Artificial Sequence
  Description of Artificial Sequence: Synthetic oligonucleotide
aaaauaaaaugaaaauugu

SEQ ID NO: 2490 - RNA, 19 nt, Artificial Sequence
  Description of Artificial Sequence: Synthetic oligonucleotide
aaaaugaaaauuguauuau

SEQ ID NO: 2491 - RNA, 25 nt, Artificial Sequence
  Description of Artificial Sequence: Synthetic oligonucleotide
cggggaaggggagggaggaggggga

SEQ ID NO: 2492 - RNA, 25 nt, Artificial Sequence
  Description of Artificial Sequence: Synthetic oligonucleotide
acgagggcucuggcggguuuggagg

SEQ ID NO: 2493 - RNA, 25 nt, Artificial Sequence
  Description of Artificial Sequence: Synthetic oligonucleotide
gggcugaacaucgcgggguguucug

SEQ ID NO: 2494 - RNA, 25 nt, Artificial Sequence
  Description of Artificial Sequence: Synthetic oligonucleotide
ggugucccccgccccgccucuccaa

SEQ ID NO: 2495 - RNA, 25 nt, Artificial Sequence
  Description of Artificial Sequence: Synthetic oligonucleotide
aaaagcuacaccgacgcggaccgcg

SEQ ID NO: 2496 - RNA, 25 nt, Artificial Sequence
  Description of Artificial Sequence: Synthetic oligonucleotide
ggcggcguccucccucgcccucgcu

SEQ ID NO: 2497 - RNA, 25 nt, Artificial Sequence
  Description of Artificial Sequence: Synthetic oligonucleotide
uucaccucgcgggcuccgaaugcgg

SEQ ID NO: 2498 - RNA, 25 nt, Artificial Sequence
  Description of Artificial Sequence: Synthetic oligonucleotide
gggagcucggauguccgguuuccug

SEQ ID NO: 2499 - RNA, 25 nt, Artificial Sequence
  Description of Artificial Sequence: Synthetic oligonucleotide
gugaggcuuuuaccugacacccgcc

SEQ ID NO: 2500 - RNA, 25 nt, Artificial Sequence
  Description of Artificial Sequence: Synthetic oligonucleotide
cgccuuuccccggcacuggcuggga

SEQ ID NO: 2501 - RNA, 25 nt, Artificial Sequence
  Description of Artificial Sequence: Synthetic oligonucleotide
agggcgcccugcaaaguugggaacg

SEQ ID NO: 2502 - RNA, 25 nt, Artificial Sequence
  Description of Artificial Sequence: Synthetic oligonucleotide
gcggagccccggacccgcucccgcc

SEQ ID NO: 2503 - RNA, 25 nt, Artificial Sequence
  Description of Artificial Sequence: Synthetic oligonucleotide
cgccuccggcucgcccagggggggu

SEQ ID NO: 2504 - RNA, 25 nt, Artificial Sequence
  Description of Artificial Sequence: Synthetic oligonucleotide
ucgccgggaggagcccgggggagag

SEQ ID NO: 2505 - RNA, 25 nt, Artificial Sequence
  Description of Artificial Sequence: Synthetic oligonucleotide
gggaccaggaggggcccgcggccuc

SEQ ID NO: 2506 - RNA, 25 nt, Artificial Sequence
  Description of Artificial Sequence: Synthetic oligonucleotide
cgcaggggcgcccgcgcccccaccc

SEQ ID NO: 2507 - RNA, 25 nt, Artificial Sequence
  Description of Artificial Sequence: Synthetic oligonucleotide
ccugcccccgccagcggaccggucc

SEQ ID NO: 2508 - RNA, 25 nt, Artificial Sequence
  Description of Artificial Sequence: Synthetic oligonucleotide
ccccacccccgguccuuccaccaug

SEQ ID NO: 2509 - RNA, 25 nt, Artificial Sequence
  Description of Artificial Sequence: Synthetic oligonucleotide
gcacuugcugggcuucuucucugug

SEQ ID NO: 2510 - RNA, 25 nt, Artificial Sequence
  Description of Artificial Sequence: Synthetic oligonucleotide
ggcguguucucugcucgccgcugcg

SEQ ID NO: 2511 - RNA, 25 nt, Artificial Sequence
  Description of Artificial Sequence: Synthetic oligonucleotide
gcugcucccggguccucgcgaggcg

SEQ ID NO: 2512 - RNA, 25 nt, Artificial Sequence
  Description of Artificial Sequence: Synthetic oligonucleotide
gcccgccgccgccgccgccuucgag

SEQ ID NO: 2513 - RNA, 25 nt, Artificial Sequence
  Description of Artificial Sequence: Synthetic oligonucleotide
guccggacucgaccucucggacgcg

SEQ ID NO: 2514 - RNA, 25 nt, Artificial Sequence
  Description of Artificial Sequence: Synthetic oligonucleotide
ggagcccgacgcgggcgaggccacg

SEQ ID NO: 2515 - RNA, 25 nt, Artificial Sequence
  Description of Artificial Sequence: Synthetic oligonucleotide
ggcuuaugcaagcaaagaucuggag

SEQ ID NO: 2516 - RNA, 25 nt, Artificial Sequence
  Description of Artificial Sequence: Synthetic oligonucleotide
ggagcaguuacggucuguguccagu

SEQ ID NO: 2517 - RNA, 25 nt, Artificial Sequence
  Description of Artificial Sequence: Synthetic oligonucleotide
uguagaugaacucaugacuguacuc

SEQ ID NO: 2518 - RNA, 25 nt, Artificial Sequence
  Description of Artificial Sequence: Synthetic oligonucleotide
cuacccagaauauuggaaaauguac

SEQ ID NO: 2519 - RNA, 25 nt, Artificial Sequence
  Description of Artificial Sequence: Synthetic oligonucleotide
caagugucagcuaaggaaaggaggc

SEQ ID NO: 2520 - RNA, 25 nt, Artificial Sequence
  Description of Artificial Sequence: Synthetic oligonucleotide
cuggcaacauaacagagaacaggcc

SEQ ID NO: 2521 - RNA, 25 nt, Artificial Sequence
  Description of Artificial Sequence: Synthetic oligonucleotide
caaccucaacucaaggacagaagag

SEQ ID NO: 2522 - RNA, 25 nt, Artificial Sequence
  Description of Artificial Sequence: Synthetic oligonucleotide
gacuauaaaauuugcugcagcacau

SEQ ID NO: 2523 - RNA, 25 nt, Artificial Sequence
  Description of Artificial Sequence: Synthetic oligonucleotide
uuauaauacagagaucuugaaaagu

SEQ ID NO: 2524 - RNA, 25 nt, Artificial Sequence
  Description of Artificial Sequence: Synthetic oligonucleotide
uauugauaaugaguggagaaagacu

SEQ ID NO: 2525 - RNA, 25 nt, Artificial Sequence
  Description of Artificial Sequence: Synthetic oligonucleotide
ucaaugcaugccacgggaggugugu

SEQ ID NO: 2526 - RNA, 25 nt, Artificial Sequence
  Description of Artificial Sequence: Synthetic oligonucleotide
uauagauguggggaaggaguuugga

SEQ ID NO: 2527 - RNA, 25 nt, Artificial Sequence
  Description of Artificial Sequence: Synthetic oligonucleotide
agucgcgacaaacaccuucuuuaaa

SEQ ID NO: 2528 - RNA, 25 nt, Artificial Sequence
  Description of Artificial Sequence: Synthetic oligonucleotide
accuccauguguguccgucuacaga

SEQ ID NO: 2529 - RNA, 25 nt, Artificial Sequence
  Description of Artificial Sequence: Synthetic oligonucleotide
auguggggguugcugcaauagugag

SEQ ID NO: 2530 - RNA, 25 nt, Artificial Sequence
  Description of Artificial Sequence: Synthetic oligonucleotide
ggggcugcagugcaugaacaccagc

SEQ ID NO: 2531 - RNA, 25 nt, Artificial Sequence
  Description of Artificial Sequence: Synthetic oligonucleotide
cacgagcuaccucagcaagacguua

SEQ ID NO: 2532 - RNA, 25 nt, Artificial Sequence
  Description of Artificial Sequence: Synthetic oligonucleotide
auuugaaauuacagugccucucucu

SEQ ID NO: 2533 - RNA, 25 nt, Artificial Sequence
  Description of Artificial Sequence: Synthetic oligonucleotide
ucaaggccccaaaccaguaacaauc

SEQ ID NO: 2534 - RNA, 25 nt, Artificial Sequence
  Description of Artificial Sequence: Synthetic oligonucleotide
caguuuugccaaucacacuuccugc

SEQ ID NO: 2535 - RNA, 25 nt, Artificial Sequence
  Description of Artificial Sequence: Synthetic oligonucleotide
ccgaugcaugucuaaacuggauguu

SEQ ID NO: 2536 - RNA, 25 nt, Artificial Sequence
  Description of Artificial Sequence: Synthetic oligonucleotide
uuacagacaaguucauuccauuauu

SEQ ID NO: 2537 - RNA, 25 nt, Artificial Sequence
  Description of Artificial Sequence: Synthetic oligonucleotide
uagacguucccugccagcaacacua

SEQ ID NO: 2538 - RNA, 25 nt, Artificial Sequence
  Description of Artificial Sequence: Synthetic oligonucleotide
accacagugucaggcagcgaacaag

SEQ ID NO: 2539 - RNA, 25 nt, Artificial Sequence
  Description of Artificial Sequence: Synthetic oligonucleotide
gaccugccccaccaauuacaugugg

SEQ ID NO: 2540 - RNA, 25 nt, Artificial Sequence
  Description of Artificial Sequence: Synthetic oligonucleotide
gaauaaucacaucugcagaugccug

SEQ ID NO: 2541 - RNA, 25 nt, Artificial Sequence
  Description of Artificial Sequence: Synthetic oligonucleotide
ggcucaggaagauuuuauguuuucc

SEQ ID NO: 2542 - RNA, 25 nt, Artificial Sequence
  Description of Artificial Sequence: Synthetic oligonucleotide
cucggaugcuggagaugacucaaca

SEQ ID NO: 2543 - RNA, 25 nt, Artificial Sequence
  Description of Artificial Sequence: Synthetic oligonucleotide
agauggauuccaugacaucugugga

SEQ ID NO: 2544 - RNA, 25 nt, Artificial Sequence
  Description of Artificial Sequence: Synthetic oligonucleotide
accaaacaaggagcuggaugaagag

SEQ ID NO: 2545 - RNA, 25 nt, Artificial Sequence
  Description of Artificial Sequence: Synthetic oligonucleotide
gaccugucagugugucugcagagcg

SEQ ID NO: 2546 - RNA, 25 nt, Artificial Sequence
  Description of Artificial Sequence: Synthetic oligonucleotide
ggggcuucggccugccagcugugga

SEQ ID NO: 2547 - RNA, 25 nt, Artificial Sequence
  Description of Artificial Sequence: Synthetic oligonucleotide
accccacaaagaacuagacagaaac

SEQ ID NO: 2548 - RNA, 25 nt, Artificial Sequence
  Description of Artificial Sequence: Synthetic oligonucleotide
cucaugccagugugucuguaaaaac

SEQ ID NO: 2549 - RNA, 25 nt, Artificial Sequence
  Description of Artificial Sequence: Synthetic oligonucleotide
caaacucuuccccagccaauguggg

SEQ ID NO: 2550 - RNA, 25 nt, Artificial Sequence
  Description of Artificial Sequence: Synthetic oligonucleotide
ggccaaccgagaauuugaugaaaac

SEQ ID NO: 2551 - RNA, 25 nt, Artificial Sequence
  Description of Artificial Sequence: Synthetic oligonucleotide
cacaugccaguguguauguaaaaga

SEQ ID NO: 2552 - RNA, 25 nt, Artificial Sequence
  Description of Artificial Sequence: Synthetic oligonucleotide
aaccugccccagaaaucaaccccua

SEQ ID NO: 2553 - RNA, 25 nt, Artificial Sequence
  Description of Artificial Sequence: Synthetic oligonucleotide
aaauccuggaaaaugugccugugaa

SEQ ID NO: 2554 - RNA, 25 nt, Artificial Sequence
  Description of Artificial Sequence: Synthetic oligonucleotide
auguacagaaaguccacagaaaugc

SEQ ID NO: 2555 - RNA, 25 nt, Artificial Sequence
  Description of Artificial Sequence: Synthetic oligonucleotide
cuuguuaaaaggaaagaaguuccac

SEQ ID NO: 2556 - RNA, 25 nt, Artificial Sequence
  Description of Artificial Sequence: Synthetic oligonucleotide
ccaccaaacaugcagcuguuacaga

SEQ ID NO: 2557 - RNA, 25 nt, Artificial Sequence
  Description of Artificial Sequence: Synthetic oligonucleotide
acggccauguacgaaccgccagaag

SEQ ID NO: 2558 - RNA, 25 nt, Artificial Sequence
  Description of Artificial Sequence: Synthetic oligonucleotide
ggcuugugagccaggauuuucauau

SEQ ID NO: 2559 - RNA, 25 nt, Artificial Sequence
  Description of Artificial Sequence: Synthetic oligonucleotide
uagugaagaagugugucguuguguc

SEQ ID NO: 2560 - RNA, 25 nt, Artificial Sequence
  Description of Artificial Sequence: Synthetic oligonucleotide
cccuucauauuggaaaagaccacaa

SEQ ID NO: 2561 - RNA, 25 nt, Artificial Sequence
  Description of Artificial Sequence: Synthetic oligonucleotide
aaugagcuaagauuguacuguuuuc

SEQ ID NO: 2562 - RNA, 25 nt, Artificial Sequence
  Description of Artificial Sequence: Synthetic oligonucleotide
ccaguucaucgauuuucuauuaugg

SEQ ID NO: 2563 - RNA, 25 nt, Artificial Sequence
  Description of Artificial Sequence: Synthetic oligonucleotide
gaaaacuguguugccacaguagaac

SEQ ID NO: 2564 - RNA, 25 nt, Artificial Sequence
  Description of Artificial Sequence: Synthetic oligonucleotide
cugucugugaacagagagacccuug

SEQ ID NO: 2565 - RNA, 25 nt, Artificial Sequence
  Description of Artificial Sequence: Synthetic oligonucleotide
guggguccaugcuaacaaagacaaa

SEQ ID NO: 2566 - RNA, 25 nt, Artificial Sequence
  Description of Artificial Sequence: Synthetic oligonucleotide
aagucugucuuuccugaaccaugug

SEQ ID NO: 2567 - RNA, 25 nt, Artificial Sequence
  Description of Artificial Sequence: Synthetic oligonucleotide
ggauaacuuuacagaaauggacugg

SEQ ID NO: 2568 - RNA, 25 nt, Artificial Sequence
  Description of Artificial Sequence: Synthetic oligonucleotide
gagcucaucugcaaaaggccucuug

SEQ ID NO: 2569 - RNA, 25 nt, Artificial Sequence
  Description of Artificial Sequence: Synthetic oligonucleotide
guaaagacugguuuucugccaauga

SEQ ID NO: 2570 - RNA, 25 nt, Artificial Sequence
  Description of Artificial Sequence: Synthetic oligonucleotide
accaaacagccaagauuuuccucuu

SEQ ID NO: 2571 - RNA, 25 nt, Artificial Sequence
  Description of Artificial Sequence: Synthetic oligonucleotide
ugugauuucuuuaaaagaaugacua

SEQ ID NO: 2572 - RNA, 25 nt, Artificial Sequence
  Description of Artificial Sequence: Synthetic oligonucleotide
auauaauuuauuuccacuaaaaaua

SEQ ID NO: 2573 - RNA, 25 nt, Artificial Sequence
  Description of Artificial Sequence: Synthetic oligonucleotide
auuguuucugcauucauuuuuauag

SEQ ID NO: 2574 - RNA, 25 nt, Artificial Sequence
  Description of Artificial Sequence: Synthetic oligonucleotide
gcaacaacaauugguaaaacucacu

SEQ ID NO: 2575 - RNA, 25 nt, Artificial Sequence
  Description of Artificial Sequence: Synthetic oligonucleotide
ugugaucaauauuuuuauaucaugc

SEQ ID NO: 2576 - RNA, 25 nt, Artificial Sequence
  Description of Artificial Sequence: Synthetic oligonucleotide
caaaauauguuuaaaauaaaaugaa

SEQ ID NO: 2577 - RNA, 25 nt, Artificial Sequence
  Description of Artificial Sequence: Synthetic oligonucleotide
uaaaauaaaaugaaaauuguauuau

SEQ ID NO: 2578 - RNA, 2128 nt, Homo sapiens
caagacuucucugcauuuucugccaaaaucugugucagauuuaagacacaugcuucugcaagcuuccaugaagguugugcaaaaaaguuucaauccagaguuggguuccagcuuucuguagcuguaagcauugguggccacaccaccuccuuacaaagcaacuagaaccugcggcauacauuggagagauuuuuuuaauuuucuggacaugaaguaaauuuagagugcuuucuaauuucagguagaagacauguccaccuucugauuauuuuuggagaacauuuugauuuuuuucaucucucucuccccaccccuaagauugugcaaaaaaagcguaccuugccuaauugaaauaauuucauuggauuuugaucagaacugauuauuugguuuucugugugaaguuuugagguuucaaacuuuccuucuggagaaugccuuuugaaacaauuuucucuagcugccugaugucaacugcuuaguaaucaguggauauugaaauauucaaaauguacagagaguggguaguggugaauguuuucaugauguuguacguccagcuggugcagggcuccaguaaugaacauggaccagugaagcgaucaucucaguccacauuggaacgaucugaacagcagaucagggcugcuucuaguuuggaggaacuacuucgaauuacucacucugaggacuggaagcuguggagaugcaggcugaggcucaaaaguuuuaccaguauggacucucgcucagcaucccaucgguccacuagguuugcggcaacuuucuaugacauugaaacacuaaaaguuauagaugaagaauggcaaagaacucagugcagcccuagagaaacgugcguggagguggccagugagcuggggaagaguaccaacacauucuucaagcccccuugugugaacguguuccgaugugguggcuguugcaaugaagagagccuuaucuguaugaacaccagcaccucguacauuuccaaacagcucuuugagauaucagugccuuugacaucaguaccugaauuagugccuguuaaaguugccaaucauacagguuguaagugcuugccaacagccccccgccauccauacucaauuaucagaagauccauccagaucccugaagaagaucgcuguucccauuccaagaaacucuguccuauugacaugcuaugggauagcaacaaauguaaauguguuuugcaggaggaaaauccacuugcuggaacagaagaccacucucaucuccaggaaccagcucucugugggccacacaugauguuugacgaagaucguugcgagugugucuguaaaacaccaugucccaaagaucuaauccagcaccccaaaaacugcaguugcuuugagugcaaagaaagucuggagaccugcugccagaagcacaagcuauuucacccagacaccugcagcugugaggacagaugccccuuucauaccagaccaugugcaaguggcaaaacagcaugugcaaagcauugccgcuuuccaaaggagaaaagggcugcccaggggccccacagccgaaagaauccuugauucagcguuccaaguuccccaucccugucauuuuuaacagcaugcugcuuugccaaguugcugucacuguuuuuuucccagguguuaaaaaaaaaauccauuuuacacagcaccacagugaauccagaccaaccuuccauucacaccagcuaaggagucccugguucauugauggaugucuucuagcugcagaugccucugcgcaccaaggaauggagaggaggggacccauguaauccuuuuguuuaguuuuguuuuuguuuuuuggugaaugagaaaggugugcuggucauggaauggcaggugucauaugacugauuacucagagcagaugaggaaaacuguagucucugaguccuuugcuaaucgcaacucuugugaauuauucugauucuuuuuuaugcagaauuugauucguaugaucaguacugacuuucugauuacuguccagcuuauagucuuccaguuuaaugaacuaccaucugauguuucauauuuaaguguauuuaaagaaaauaaacaccauuauucaagccaaaaaaaaaaaaaaaaaa

SEQ ID NO: 2579 - RNA, 19 nt, Artificial Sequence
  Description of Artificial Sequence: Synthetic oligonucleotide
caagacuucucugcauuuu

SEQ ID NO: 2580 - RNA, 19 nt, Artificial Sequence
  Description of Artificial Sequence: Synthetic oligonucleotide
ucugccaaaaucuguguca

SEQ ID NO: 2581 - RNA, 19 nt, Artificial Sequence
  Description of Artificial Sequence: Synthetic oligonucleotide
agauuuaagacacaugcuu

SEQ ID NO: 2582 - RNA, 19 nt, Artificial Sequence
  Description of Artificial Sequence: Synthetic oligonucleotide
ucugcaagcuuccaugaag

SEQ ID NO: 2583 - RNA, 19 nt, Artificial Sequence
  Description of Artificial Sequence: Synthetic oligonucleotide
gguugugcaaaaaaguuuc

SEQ ID NO: 2584 - RNA, 19 nt, Artificial Sequence
  Description of Artificial Sequence: Synthetic oligonucleotide
caauccagaguuggguucc

SEQ ID NO: 2585 - RNA, 19 nt, Artificial Sequence
  Description of Artificial Sequence: Synthetic oligonucleotide
cagcuuucuguagcuguaa

SEQ ID NO: 2586 - RNA, 19 nt, Artificial Sequence
  Description of Artificial Sequence: Synthetic oligonucleotide
agcauugguggccacacca

SEQ ID NO: 2587 - RNA, 19 nt, Artificial Sequence
  Description of Artificial Sequence: Synthetic oligonucleotide
accuccuuacaaagcaacu

SEQ ID NO: 2588 - RNA, 19 nt, Artificial Sequence
  Description of Artificial Sequence: Synthetic oligonucleotide
uagaaccugcggcauacau

SEQ ID NO: 2589 - RNA, 19 nt, Artificial Sequence
  Description of Artificial Sequence: Synthetic oligonucleotide
uuggagagauuuuuuuaau

SEQ ID NO: 2590 - RNA, 19 nt, Artificial Sequence
  Description of Artificial Sequence: Synthetic oligonucleotide
uuuucuggacaugaaguaa

SEQ ID NO: 2591 - RNA, 19 nt, Artificial Sequence
  Description of Artificial Sequence: Synthetic oligonucleotide
aauuuagagugcuuucuaa

SEQ ID NO: 2592 - RNA, 19 nt, Artificial Sequence
  Description of Artificial Sequence: Synthetic oligonucleotide
auuucagguagaagacaug

SEQ ID NO: 2593 - RNA, 19 nt, Artificial Sequence
  Description of Artificial Sequence: Synthetic oligonucleotide
guccaccuucugauuauuu

SEQ ID NO: 2594 - RNA, 19 nt, Artificial Sequence
  Description of Artificial Sequence: Synthetic oligonucleotide
uuuggagaacauuuugauu

SEQ ID NO: 2595 - RNA, 19 nt, Artificial Sequence
  Description of Artificial Sequence: Synthetic oligonucleotide
uuuuuucaucucucucucc

SEQ ID NO: 2596 - RNA, 19 nt, Artificial Sequence
  Description of Artificial Sequence: Synthetic oligonucleotide
cccaccccuaagauugugc

SEQ ID NO: 2597 - RNA, 19 nt, Artificial Sequence
  Description of Artificial Sequence: Synthetic oligonucleotide
caaaaaaagcguaccuugc

SEQ ID NO: 2598 - RNA, 19 nt, Artificial Sequence
  Description of Artificial Sequence: Synthetic oligonucleotide
ccuaauugaaauaauuuca

SEQ ID NO: 2599 - RNA, 19 nt, Artificial Sequence
  Description of Artificial Sequence: Synthetic oligonucleotide
auuggauuuugaucagaac

SEQ ID NO: 2600 - RNA, 19 nt, Artificial Sequence
  Description of Artificial Sequence: Synthetic oligonucleotide
cugauuauuugguuuucug

SEQ ID NO: 2601 - RNA, 19 nt, Artificial Sequence
  Description of Artificial Sequence: Synthetic oligonucleotide
gugugaaguuuugagguuu

SEQ ID NO: 2602 - RNA, 19 nt, Artificial Sequence
  Description of Artificial Sequence: Synthetic oligonucleotide
ucaaacuuuccuucuggag

SEQ ID NO: 2603 - RNA, 19 nt, Artificial Sequence
  Description of Artificial Sequence: Synthetic oligonucleotide
gaaugccuuuugaaacaau

SEQ ID NO: 2604 - RNA, 19 nt, Artificial Sequence
  Description of Artificial Sequence: Synthetic oligonucleotide
uuuucucuagcugccugau

SEQ ID NO: 2605 - RNA, 19 nt, Artificial Sequence
  Description of Artificial Sequence: Synthetic oligonucleotide
ugucaacugcuuaguaauc

SEQ ID NO: 2606 - RNA, 19 nt, Artificial Sequence
  Description of Artificial Sequence: Synthetic oligonucleotide
caguggauauugaaauauu

SEQ ID NO: 2607 - RNA, 19 nt, Artificial Sequence
  Description of Artificial Sequence: Synthetic oligonucleotide
ucaaaauguacagagagug

SEQ ID NO: 2608 - RNA, 19 nt, Artificial Sequence
  Description of Artificial Sequence: Synthetic oligonucleotide
ggguaguggugaauguuuu

SEQ ID NO: 2609 - RNA, 19 nt, Artificial Sequence
  Description of Artificial Sequence: Synthetic oligonucleotide
ucaugauguuguacgucca

SEQ ID NO: 2610 - RNA, 19 nt, Artificial Sequence
  Description of Artificial Sequence: Synthetic oligonucleotide
agcuggugcagggcuccag

SEQ ID NO: 2611 - RNA, 19 nt, Artificial Sequence
  Description of Artificial Sequence: Synthetic oligonucleotide
guaaugaacauggaccagu

SEQ ID NO: 2612 - RNA, 19 nt, Artificial Sequence
  Description of Artificial Sequence: Synthetic oligonucleotide
ugaagcgaucaucucaguc

SEQ ID NO: 2613 - RNA, 19 nt, Artificial Sequence
  Description of Artificial Sequence: Synthetic oligonucleotide
ccacauuggaacgaucuga

SEQ ID NO: 2614 - RNA, 19 nt, Artificial Sequence
  Description of Artificial Sequence: Synthetic oligonucleotide
aacagcagaucagggcugc

SEQ ID NO: 2615 - RNA, 19 nt, Artificial Sequence
  Description of Artificial Sequence: Synthetic oligonucleotide
cuucuaguuuggaggaacu

SEQ ID NO: 2616 - RNA, 19 nt, Artificial Sequence
  Description of Artificial Sequence: Synthetic oligonucleotide
uacuucgaauuacucacuc

SEQ ID NO: 2617 - RNA, 19 nt, Artificial Sequence
  Description of Artificial Sequence: Synthetic oligonucleotide
cugaggacuggaagcugug

SEQ ID NO: 2618 - RNA, 19 nt, Artificial Sequence
  Description of Artificial Sequence: Synthetic oligonucleotide
ggagaugcaggcugaggcu

SEQ ID NO: 2619 - RNA, 19 nt, Artificial Sequence
  Description of Artificial Sequence: Synthetic oligonucleotide
ucaaaaguuuuaccaguau

SEQ ID NO: 2620 - RNA, 19 nt, Artificial Sequence
  Description of Artificial Sequence: Synthetic oligonucleotide
uggacucucgcucagcauc

SEQ ID NO: 2621 - RNA, 19 nt, Artificial Sequence
  Description of Artificial Sequence: Synthetic oligonucleotide
cccaucgguccacuagguu

SEQ ID NO: 2622 - RNA, 19 nt, Artificial Sequence
  Description of Artificial Sequence: Synthetic oligonucleotide
uugcggcaacuuucuauga

SEQ ID NO: 2623 - RNA, 19 nt, Artificial Sequence
  Description of Artificial Sequence: Synthetic oligonucleotide
acauugaaacacuaaaagu

SEQ ID NO: 2624 - RNA, 19 nt, Artificial Sequence
  Description of Artificial Sequence: Synthetic oligonucleotide
uuauagaugaagaauggca

SEQ ID NO: 2625 - RNA, 19 nt, Artificial Sequence
  Description of Artificial Sequence: Synthetic oligonucleotide
aaagaacucagugcagccc

SEQ ID NO: 2626 - RNA, 19 nt, Artificial Sequence
  Description of Artificial Sequence: Synthetic oligonucleotide
cuagagaaacgugcgugga

SEQ ID NO: 2627 - RNA, 19 nt, Artificial Sequence
  Description of Artificial Sequence: Synthetic oligonucleotide
agguggccagugagcuggg

SEQ ID NO: 2628 - RNA, 19 nt, Artificial Sequence
  Description of Artificial Sequence: Synthetic oligonucleotide
ggaagaguaccaacacauu

SEQ ID NO: 2629 - RNA, 19 nt, Artificial Sequence
  Description of Artificial Sequence: Synthetic oligonucleotide
ucuucaagcccccuugugu

SEQ ID NO: 2630 - RNA, 19 nt, Artificial Sequence
  Description of Artificial Sequence: Synthetic oligonucleotide
ugaacguguuccgaugugg

SEQ ID NO: 2631 - RNA, 19 nt, Artificial Sequence
  Description of Artificial Sequence: Synthetic oligonucleotide
guggcuguugcaaugaaga

SEQ ID NO: 2632 - RNA, 19 nt, Artificial Sequence
  Description of Artificial Sequence: Synthetic oligonucleotide
agagccuuaucuguaugaa

SEQ ID NO: 2633 - RNA, 19 nt, Artificial Sequence
  Description of Artificial Sequence: Synthetic oligonucleotide
acaccagcaccucguacau

SEQ ID NO: 2634 - RNA, 19 nt, Artificial Sequence
  Description of Artificial Sequence: Synthetic oligonucleotide
uuuccaaacagcucuuuga

SEQ ID NO: 2635 - RNA, 19 nt, Artificial Sequence
  Description of Artificial Sequence: Synthetic oligonucleotide
agauaucagugccuuugac

SEQ ID NO: 2636 - RNA, 19 nt, Artificial Sequence
  Description of Artificial Sequence: Synthetic oligonucleotide
caucaguaccugaauuagu

SEQ ID NO: 2637 - RNA, 19 nt, Artificial Sequence
  Description of Artificial Sequence: Synthetic oligonucleotide
ugccuguuaaaguugccaa

SEQ ID NO: 2638 - RNA, 19 nt, Artificial Sequence
  Description of Artificial Sequence: Synthetic oligonucleotide
aucauacagguuguaagug

SEQ ID NO: 2639 - RNA, 19 nt, Artificial Sequence
  Description of Artificial Sequence: Synthetic oligonucleotide
gcuugccaacagccccccg

SEQ ID NO: 2640 - RNA, 19 nt, Artificial Sequence
  Description of Artificial Sequence: Synthetic oligonucleotide
gccauccauacucaauuau

SEQ ID NO: 2641 - RNA, 19 nt, Artificial Sequence
  Description of Artificial Sequence: Synthetic oligonucleotide
ucagaagauccauccagau

SEQ ID NO: 2642 - RNA, 19 nt, Artificial Sequence
  Description of Artificial Sequence: Synthetic oligonucleotide
ucccugaagaagaucgcug

SEQ ID NO: 2643 - RNA, 19 nt, Artificial Sequence
  Description of Artificial Sequence: Synthetic oligonucleotide
guucccauuccaagaaacu

SEQ ID NO: 2644 - RNA, 19 nt, Artificial Sequence
  Description of Artificial Sequence: Synthetic oligonucleotide
ucuguccuauugacaugcu

SEQ ID NO: 2645 - RNA, 19 nt, Artificial Sequence
  Description of Artificial Sequence: Synthetic oligonucleotide
uaugggauagcaacaaaug

SEQ ID NO: 2646 - RNA, 19 nt, Artificial Sequence
  Description of Artificial Sequence: Synthetic oligonucleotide
guaaauguguuuugcagga

SEQ ID NO: 2647 - RNA, 19 nt, Artificial Sequence
  Description of Artificial Sequence: Synthetic oligonucleotide
aggaaaauccacuugcugg

SEQ ID NO: 2648 - RNA, 19 nt, Artificial Sequence
  Description of Artificial Sequence: Synthetic oligonucleotide
gaacagaagaccacucuca

SEQ ID NO: 2649 - RNA, 19 nt, Artificial Sequence
  Description of Artificial Sequence: Synthetic oligonucleotide
aucuccaggaaccagcucu

SEQ ID NO: 2650 - RNA, 19 nt, Artificial Sequence
  Description of Artificial Sequence: Synthetic oligonucleotide
ucugugggccacacaugau

SEQ ID NO: 2651 - RNA, 19 nt, Artificial Sequence
  Description of Artificial Sequence: Synthetic oligonucleotide
uguuugacgaagaucguug

SEQ ID NO: 2652 - RNA, 19 nt, Artificial Sequence
  Description of Artificial Sequence: Synthetic oligonucleotide
gcgagugugucuguaaaac

SEQ ID NO: 2653 - RNA, 19 nt, Artificial Sequence
  Description of Artificial Sequence: Synthetic oligonucleotide
caccaugucccaaagaucu

SEQ ID NO: 2654 - RNA, 19 nt, Artificial Sequence
  Description of Artificial Sequence: Synthetic oligonucleotide
uaauccagcaccccaaaaa

SEQ ID NO: 2655 - RNA, 19 nt, Artificial Sequence
  Description of Artificial Sequence: Synthetic oligonucleotide
acugcaguugcuuugagug

SEQ ID NO: 2656 - RNA, 19 nt, Artificial Sequence
  Description of Artificial Sequence: Synthetic oligonucleotide
gcaaagaaagucuggagac

SEQ ID NO: 2657 - RNA, 19 nt, Artificial Sequence
  Description of Artificial Sequence: Synthetic oligonucleotide
ccugcugccagaagcacaa

SEQ ID NO: 2658 - RNA, 19 nt, Artificial Sequence
  Description of Artificial Sequence: Synthetic oligonucleotide
agcuauuucacccagacac

SEQ ID NO: 2659 - RNA, 19 nt, Artificial Sequence
  Description of Artificial Sequence: Synthetic oligonucleotide
ccugcagcugugaggacag

SEQ ID NO: 2660 - RNA, 19 nt, Artificial Sequence
  Description of Artificial Sequence: Synthetic oligonucleotide
gaugccccuuucauaccag

SEQ ID NO: 2661 - RNA, 19 nt, Artificial Sequence
  Description of Artificial Sequence: Synthetic oligonucleotide
gaccaugugcaaguggcaa

SEQ ID NO: 2662 - RNA, 19 nt, Artificial Sequence
  Description of Artificial Sequence: Synthetic oligonucleotide
aaacagcaugugcaaagca

SEQ ID NO: 2663 - RNA, 19 nt, Artificial Sequence
  Description of Artificial Sequence: Synthetic oligonucleotide
auugccgcuuuccaaagga

SEQ ID NO: 2664 - RNA, 19 nt, Artificial Sequence
  Description of Artificial Sequence: Synthetic oligonucleotide
agaaaagggcugcccaggg

SEQ ID NO: 2665 - RNA, 19 nt, Artificial Sequence
  Description of Artificial Sequence: Synthetic oligonucleotide
ggccccacagccgaaagaa

SEQ ID NO: 2666 - RNA, 19 nt, Artificial Sequence
  Description of Artificial Sequence: Synthetic oligonucleotide
auccuugauucagcguucc

SEQ ID NO: 2667 - RNA, 19 nt, Artificial Sequence
  Description of Artificial Sequence: Synthetic oligonucleotide
caaguuccccaucccuguc

SEQ ID NO: 2668 - RNA, 19 nt, Artificial Sequence
  Description of Artificial Sequence: Synthetic oligonucleotide
cauuuuuaacagcaugcug

SEQ ID NO: 2669 - RNA, 19 nt, Artificial Sequence
  Description of Artificial Sequence: Synthetic oligonucleotide
gcuuugccaaguugcuguc

SEQ ID NO: 2670 - RNA, 19 nt, Artificial Sequence
  Description of Artificial Sequence: Synthetic oligonucleotide
cacuguuuuuuucccaggu

SEQ ID NO: 2671 - RNA, 19 nt, Artificial Sequence
  Description of Artificial Sequence: Synthetic oligonucleotide
uuuuacacagcaccacagu

SEQ ID NO: 2672 - RNA, 19 nt, Artificial Sequence
  Description of Artificial Sequence: Synthetic oligonucleotide
ugaauccagaccaaccuuc

SEQ ID NO: 2673 - RNA, 19 nt, Artificial Sequence
  Description of Artificial Sequence: Synthetic oligonucleotide
ccauucacaccagcuaagg

SEQ ID NO: 2674 - RNA, 19 nt, Artificial Sequence
  Description of Artificial Sequence: Synthetic oligonucleotide
gagucccugguucauugau

SEQ ID NO: 2675 - RNA, 19 nt, Artificial Sequence
  Description of Artificial Sequence: Synthetic oligonucleotide
uggaugucuucuagcugca

SEQ ID NO: 2676 - RNA, 19 nt, Artificial Sequence
  Description of Artificial Sequence: Synthetic oligonucleotide
agaugccucugcgcaccaa

SEQ ID NO: 2677 - RNA, 19 nt, Artificial Sequence
  Description of Artificial Sequence: Synthetic oligonucleotide
aggaauggagaggagggga

SEQ ID NO: 2678 - RNA, 19 nt, Artificial Sequence
  Description of Artificial Sequence: Synthetic oligonucleotide
acccauguaauccuuuugu

SEQ ID NO: 2679 - RNA, 19 nt, Artificial Sequence
  Description of Artificial Sequence: Synthetic oligonucleotide
uuuaguuuuguuuuuguuu

SEQ ID NO: 2680 - RNA, 19 nt, Artificial Sequence
  Description of Artificial Sequence: Synthetic oligonucleotide
uuuuggugaaugagaaagg

SEQ ID NO: 2681 - RNA, 19 nt, Artificial Sequence
  Description of Artificial Sequence: Synthetic oligonucleotide
gugugcuggucauggaaug

SEQ ID NO: 2682 - RNA, 19 nt, Artificial Sequence
  Description of Artificial Sequence: Synthetic oligonucleotide
ggcaggugucauaugacug

SEQ ID NO: 2683 - RNA, 19 nt, Artificial Sequence
  Description of Artificial Sequence: Synthetic oligonucleotide
gauuacucagagcagauga

SEQ ID NO: 2684 - RNA, 19 nt, Artificial Sequence
  Description of Artificial Sequence: Synthetic oligonucleotide
aggaaaacuguagucucug

SEQ ID NO: 2685 - RNA, 19 nt, Artificial Sequence
  Description of Artificial Sequence: Synthetic oligonucleotide
gaguccuuugcuaaucgca

SEQ ID NO: 2686 - RNA, 19 nt, Artificial Sequence
  Description of Artificial Sequence: Synthetic oligonucleotide
aacucuugugaauuauucu

SEQ ID NO: 2687 - RNA, 19 nt, Artificial Sequence
  Description of Artificial Sequence: Synthetic oligonucleotide
ugauucuuuuuuaugcaga

SEQ ID NO: 2688 - RNA, 19 nt, Artificial Sequence
  Description of Artificial Sequence: Synthetic oligonucleotide
aauuugauucguaugauca

SEQ ID NO: 2689 - RNA, 19 nt, Artificial Sequence
  Description of Artificial Sequence: Synthetic oligonucleotide
aguacugacuuucugauua

SEQ ID NO: 2690 - RNA, 19 nt, Artificial Sequence
  Description of Artificial Sequence: Synthetic oligonucleotide
acuguccagcuuauagucu

SEQ ID NO: 2691 - RNA, 19 nt, Artificial Sequence
  Description of Artificial Sequence: Synthetic oligonucleotide
uuccaguuuaaugaacuac

SEQ ID NO: 2692 - RNA, 19 nt, Artificial Sequence
  Description of Artificial Sequence: Synthetic oligonucleotide
ccaucugauguuucauauu

SEQ ID NO: 2693 - RNA, 19 nt, Artificial Sequence
  Description of Artificial Sequence: Synthetic oligonucleotide
uuaaguguauuuaaagaaa

SEQ ID NO: 2694 - RNA, 19 nt, Artificial Sequence
  Description of Artificial Sequence: Synthetic oligonucleotide
aauaaacaccauuauucaa

SEQ ID NO: 2695 - RNA, 25 nt, Artificial Sequence
  Description of Artificial Sequence: Synthetic oligonucleotide
caagacuucucugcauuuucugcca

SEQ ID NO: 2696 - RNA, 25 nt, Artificial Sequence
  Description of Artificial Sequence: Synthetic oligonucleotide
aaaaucugugucagauuuaagacac

SEQ ID NO: 2697 - RNA, 25 nt, Artificial Sequence
  Description of Artificial Sequence: Synthetic oligonucleotide
caugcuucugcaagcuuccaugaag

SEQ ID NO: 2698 - RNA, 25 nt, Artificial Sequence
  Description of Artificial Sequence: Synthetic oligonucleotide
gguugugcaaaaaaguuucaaucca

SEQ ID NO: 2699 - RNA, 25 nt, Artificial Sequence
  Description of Artificial Sequence: Synthetic oligonucleotide
agaguuggguuccagcuuucuguag

SEQ ID NO: 2700 - RNA, 25 nt, Artificial Sequence
  Description of Artificial Sequence: Synthetic oligonucleotide
gcuguaagcauugguggccacacca

SEQ ID NO: 2701 - RNA, 25 nt, Artificial Sequence
  Description of Artificial Sequence: Synthetic oligonucleotide
accuccuuacaaagcaacuagaacc

SEQ ID NO: 2702 - RNA, 25 nt, Artificial Sequence
  Description of Artificial Sequence: Synthetic oligonucleotide
cugcggcauacauuggagagauuuu

SEQ ID NO: 2703 - RNA, 25 nt, Artificial Sequence
  Description of Artificial Sequence: Synthetic oligonucleotide
uuuuaauuuucuggacaugaaguaa

SEQ ID NO: 2704 - RNA, 25 nt, Artificial Sequence
  Description of Artificial Sequence: Synthetic oligonucleotide
aauuuagagugcuuucuaauuucag

SEQ ID NO: 2705 - RNA, 25 nt, Artificial Sequence
  Description of Artificial Sequence: Synthetic oligonucleotide
gguagaagacauguccaccuucuga

SEQ ID NO: 2706 - RNA, 25 nt, Artificial Sequence
  Description of Artificial Sequence: Synthetic oligonucleotide
auuauuuuuggagaacauuuugauu

SEQ ID NO: 2707 - RNA, 25 nt, Artificial Sequence
  Description of Artificial Sequence: Synthetic oligonucleotide
uuuuuucaucucucucuccccaccc

SEQ ID NO: 2708 - RNA, 25 nt, Artificial Sequence
  Description of Artificial Sequence: Synthetic oligonucleotide
ccuaagauugugcaaaaaaagcgua

SEQ ID NO: 2709 - RNA, 25 nt, Artificial Sequence
  Description of Artificial Sequence: Synthetic oligonucleotide
accuugccuaauugaaauaauuuca

SEQ ID NO: 2710 - RNA, 25 nt, Artificial Sequence
  Description of Artificial Sequence: Synthetic oligonucleotide
auuggauuuugaucagaacugauua

SEQ ID NO: 2711 - RNA, 25 nt, Artificial Sequence
  Description of Artificial Sequence: Synthetic oligonucleotide
auuugguuuucugugugaaguuuug

SEQ ID NO: 2712 - RNA, 25 nt, Artificial Sequence
  Description of Artificial Sequence: Synthetic oligonucleotide
gagguuucaaacuuuccuucuggag

SEQ ID NO: 2713 - RNA, 25 nt, Artificial Sequence
  Description of Artificial Sequence: Synthetic oligonucleotide
gaaugccuuuugaaacaauuuucuc

SEQ ID NO: 2714 - RNA, 25 nt, Artificial Sequence
  Description of Artificial Sequence: Synthetic oligonucleotide
cuagcugccugaugucaacugcuua

SEQ ID NO: 2715 - RNA, 25 nt, Artificial Sequence
  Description of Artificial Sequence: Synthetic oligonucleotide
aguaaucaguggauauugaaauauu

SEQ ID NO: 2716 - RNA, 25 nt, Artificial Sequence
  Description of Artificial Sequence: Synthetic oligonucleotide
ucaaaauguacagagaguggguagu

SEQ ID NO: 2717 - RNA, 25 nt, Artificial Sequence
  Description of Artificial Sequence: Synthetic oligonucleotide
uggugaauguuuucaugauguugua

SEQ ID NO: 2718 - RNA, 25 nt, Artificial Sequence
  Description of Artificial Sequence: Synthetic oligonucleotide
acguccagcuggugcagggcuccag

SEQ ID NO: 2719 - RNA, 25 nt, Artificial Sequence
  Description of Artificial Sequence: Synthetic oligonucleotide
guaaugaacauggaccagugaagcg

SEQ ID NO: 2720 - RNA, 25 nt, Artificial Sequence
  Description of Artificial Sequence: Synthetic oligonucleotide
gaucaucucaguccacauuggaacg

SEQ ID NO: 2721 - RNA, 25 nt, Artificial Sequence
  Description of Artificial Sequence: Synthetic oligonucleotide
gaucugaacagcagaucagggcugc

SEQ ID NO: 2722 - RNA, 25 nt, Artificial Sequence
  Description of Artificial Sequence: Synthetic oligonucleotide
cuucuaguuuggaggaacuacuucg

SEQ ID NO: 2723 - RNA, 25 nt, Artificial Sequence
  Description of Artificial Sequence: Synthetic oligonucleotide
gaauuacucacucugaggacuggaa

SEQ ID NO: 2724 - RNA, 25 nt, Artificial Sequence
  Description of Artificial Sequence: Synthetic oligonucleotide
agcuguggagaugcaggcugaggcu

SEQ ID NO: 2725 - RNA, 25 nt, Artificial Sequence
  Description of Artificial Sequence: Synthetic oligonucleotide
ucaaaaguuuuaccaguauggacuc

SEQ ID NO: 2726 - RNA, 25 nt, Artificial Sequence
  Description of Artificial Sequence: Synthetic oligonucleotide
cucgcucagcaucccaucgguccac

SEQ ID NO: 2727 - RNA, 25 nt, Artificial Sequence
  Description of Artificial Sequence: Synthetic oligonucleotide
cuagguuugcggcaacuuucuauga

SEQ ID NO: 2728 - RNA, 25 nt, Artificial Sequence
  Description of Artificial Sequence: Synthetic oligonucleotide
acauugaaacacuaaaaguuauaga

SEQ ID NO: 2729 - RNA, 25 nt, Artificial Sequence
  Description of Artificial Sequence: Synthetic oligonucleotide
augaagaauggcaaagaacucagug

SEQ ID NO: 2730 - RNA, 25 nt, Artificial Sequence
  Description of Artificial Sequence: Synthetic oligonucleotide
gcagcccuagagaaacgugcgugga

SEQ ID NO: 2731 - RNA, 25 nt, Artificial Sequence
  Description of Artificial Sequence: Synthetic oligonucleotide
agguggccagugagcuggggaagag

SEQ ID NO: 2732 - RNA, 25 nt, Artificial Sequence
  Description of Artificial Sequence: Synthetic oligonucleotide
guaccaacacauucuucaagccccc

SEQ ID NO: 2733 - RNA, 25 nt, Artificial Sequence
  Description of Artificial Sequence: Synthetic oligonucleotide
cuugugugaacguguuccgaugugg

SEQ ID NO: 2734 - RNA, 25 nt, Artificial Sequence
  Description of Artificial Sequence: Synthetic oligonucleotide
guggcuguugcaaugaagagagccu

SEQ ID NO: 2735 - RNA, 25 nt, Artificial Sequence
  Description of Artificial Sequence: Synthetic oligonucleotide
uuaucuguaugaacaccagcaccuc

SEQ ID NO: 2736 - RNA, 25 nt, Artificial Sequence
  Description of Artificial Sequence: Synthetic oligonucleotide
cguacauuuccaaacagcucuuuga

SEQ ID NO: 2737 - RNA, 25 nt, Artificial Sequence
  Description of Artificial Sequence: Synthetic oligonucleotide
agauaucagugccuuugacaucagu

SEQ ID NO: 2738 - RNA, 25 nt, Artificial Sequence
  Description of Artificial Sequence: Synthetic oligonucleotide
uaccugaauuagugccuguuaaagu

SEQ ID NO: 2739 - RNA, 25 nt, Artificial Sequence
  Description of Artificial Sequence: Synthetic oligonucleotide
uugccaaucauacagguuguaagug

SEQ ID NO: 2740 - RNA, 25 nt, Artificial Sequence
  Description of Artificial Sequence: Synthetic oligonucleotide
gcuugccaacagccccccgccaucc

SEQ ID NO: 2741 - RNA, 25 nt, Artificial Sequence
  Description of Artificial Sequence: Synthetic oligonucleotide
cauacucaauuaucagaagauccau

SEQ ID NO: 2742 - RNA, 25 nt, Artificial Sequence
  Description of Artificial Sequence: Synthetic oligonucleotide
uccagaucccugaagaagaucgcug

SEQ ID NO: 2743 - RNA, 25 nt, Artificial Sequence
  Description of Artificial Sequence: Synthetic oligonucleotide
guucccauuccaagaaacucugucc

SEQ ID NO: 2744 - RNA, 25 nt, Artificial Sequence
  Description of Artificial Sequence: Synthetic oligonucleotide
cuauugacaugcuaugggauagcaa

SEQ ID NO: 2745 - RNA, 25 nt, Artificial Sequence
  Description of Artificial Sequence: Synthetic oligonucleotide
acaaauguaaauguguuuugcagga

SEQ ID NO: 2746 - RNA, 25 nt, Artificial Sequence
  Description of Artificial Sequence: Synthetic oligonucleotide
aggaaaauccacuugcuggaacaga

SEQ ID NO: 2747 - RNA, 25 nt, Artificial Sequence
  Description of Artificial Sequence: Synthetic oligonucleotide
aagaccacucucaucuccaggaacc

SEQ ID NO: 2748 - RNA, 25 nt, Artificial Sequence
  Description of Artificial Sequence: Synthetic oligonucleotide
cagcucucugugggccacacaugau

SEQ ID NO: 2749 - RNA, 25 nt, Artificial Sequence
  Description of Artificial Sequence: Synthetic oligonucleotide
uguuugacgaagaucguugcgagug

SEQ ID NO: 2750 - RNA, 25 nt, Artificial Sequence
  Description of Artificial Sequence: Synthetic oligonucleotide
gugucuguaaaacaccaugucccaa

SEQ ID NO: 2751 - RNA, 25 nt, Artificial Sequence
  Description of Artificial Sequence: Synthetic oligonucleotide
aagaucuaauccagcaccccaaaaa

SEQ ID NO: 2752 - RNA, 25 nt, Artificial Sequence
  Description of Artificial Sequence: Synthetic oligonucleotide
acugcaguugcuuugagugcaaaga

SEQ ID NO: 2753 - RNA, 25 nt, Artificial Sequence
  Description of Artificial Sequence: Synthetic oligonucleotide
aaagucuggagaccugcugccagaa

SEQ ID NO: 2754 - RNA, 25 nt, Artificial Sequence
  Description of Artificial Sequence: Synthetic oligonucleotide
agcacaagcuauuucacccagacac

SEQ ID NO: 2755 - RNA, 25 nt, Artificial Sequence
  Description of Artificial Sequence: Synthetic oligonucleotide
ccugcagcugugaggacagaugccc

SEQ ID NO: 2756 - RNA, 25 nt, Artificial Sequence
  Description of Artificial Sequence: Synthetic oligonucleotide
ccuuucauaccagaccaugugcaag

SEQ ID NO: 2757 - RNA, 25 nt, Artificial Sequence
  Description of Artificial Sequence: Synthetic oligonucleotide
guggcaaaacagcaugugcaaagca

SEQ ID NO: 2758 - RNA, 25 nt, Artificial Sequence
  Description of Artificial Sequence: Synthetic oligonucleotide
auugccgcuuuccaaaggagaaaag

SEQ ID NO: 2759 - RNA, 25 nt, Artificial Sequence
  Description of Artificial Sequence: Synthetic oligonucleotide
gggcugcccaggggccccacagccg

SEQ ID NO: 2760 - RNA, 25 nt, Artificial Sequence
  Description of Artificial Sequence: Synthetic oligonucleotide
gaaagaauccuugauucagcguucc

SEQ ID NO: 2761 - RNA, 25 nt, Artificial Sequence
  Description of Artificial Sequence: Synthetic oligonucleotide
caaguuccccaucccugucauuuuu

SEQ ID NO: 2762 - RNA, 25 nt, Artificial Sequence
  Description of Artificial Sequence: Synthetic oligonucleotide
uaacagcaugcugcuuugccaaguu

SEQ ID NO: 2763 - RNA, 25 nt, Artificial Sequence
  Description of Artificial Sequence: Synthetic oligonucleotide
ugcugucacuguuuuuuucccaggu

SEQ ID NO: 2764 - RNA, 25 nt, Artificial Sequence
  Description of Artificial Sequence: Synthetic oligonucleotide
acagcaccacagugaauccagacca

SEQ ID NO: 2765 - RNA, 25 nt, Artificial Sequence
  Description of Artificial Sequence: Synthetic oligonucleotide
aaccuuccauucacaccagcuaagg

SEQ ID NO: 2766 - RNA, 25 nt, Artificial Sequence
  Description of Artificial Sequence: Synthetic oligonucleotide
gagucccugguucauugauggaugu

SEQ ID NO: 2767 - RNA, 25 nt, Artificial Sequence
  Description of Artificial Sequence: Synthetic oligonucleotide
ucuucuagcugcagaugccucugcg

SEQ ID NO: 2768 - RNA, 25 nt, Artificial Sequence
  Description of Artificial Sequence: Synthetic oligonucleotide
gcaccaaggaauggagaggagggga

SEQ ID NO: 2769 - RNA, 25 nt, Artificial Sequence
  Description of Artificial Sequence: Synthetic oligonucleotide
acccauguaauccuuuuguuuaguu

SEQ ID NO: 2770 - RNA, 25 nt, Artificial Sequence
  Description of Artificial Sequence: Synthetic oligonucleotide
uuuguuuuuguuuuuuggugaauga

SEQ ID NO: 2771 - RNA, 25 nt, Artificial Sequence
  Description of Artificial Sequence: Synthetic oligonucleotide
agaaaggugugcuggucauggaaug

SEQ ID NO: 2772 - RNA, 25 nt, Artificial Sequence
  Description of Artificial Sequence: Synthetic oligonucleotide
ggcaggugucauaugacugauuacu

SEQ ID NO: 2773 - RNA, 25 nt, Artificial Sequence
  Description of Artificial Sequence: Synthetic oligonucleotide
ucagagcagaugaggaaaacuguag

SEQ ID NO: 2774 - RNA, 25 nt, Artificial Sequence
  Description of Artificial Sequence: Synthetic oligonucleotide
gucucugaguccuuugcuaaucgca

SEQ ID NO: 2775 - RNA, 25 nt, Artificial Sequence
  Description of Artificial Sequence: Synthetic oligonucleotide
aacucuugugaauuauucugauucu

SEQ ID NO: 2776 - RNA, 25 nt, Artificial Sequence
  Description of Artificial Sequence: Synthetic oligonucleotide
uuuuuuaugcagaauuugauucgua

SEQ ID NO: 2777 - RNA, 25 nt, Artificial Sequence
  Description of Artificial Sequence: Synthetic oligonucleotide
augaucaguacugacuuucugauua

SEQ ID NO: 2778 - RNA, 25 nt, Artificial Sequence
  Description of Artificial Sequence: Synthetic oligonucleotide
acuguccagcuuauagucuuccagu

SEQ ID NO: 2779 - RNA, 25 nt, Artificial Sequence
  Description of Artificial Sequence: Synthetic oligonucleotide
uuuaaugaacuaccaucugauguuu

SEQ ID NO: 2780 - RNA, 25 nt, Artificial Sequence
  Description of Artificial Sequence: Synthetic oligonucleotide
ucauauuuaaguguauuuaaagaaa

SEQ ID NO: 2781 - RNA, 25 nt, Artificial Sequence
  Description of Artificial Sequence: Synthetic oligonucleotide
aauaaacaccauuauucaagccaaa

SEQ ID NO: 2782 - RNA, 1758 nt, Homo sapiens
cugcugucugcggaggaaacugcaucgacggacggccgcccagcuacgggaggaccuggaguggcacugggcgcccgacggaccauccccgggacccgccugccccucggcgccccgccccgccgggccgcuccccgucggguuccccagccacagccuuaccuacgggcuccugacuccgcaaggcuuccagaagaugcucgaaccaccggccggggccucggggcagcagugagggaggcguccagccccccacucagcucuucuccuccugugccaggggcuccccgggggaugagcauggugguuuucccucggagcccccuggcucgggacgucugagaagaugccggucaugaggcuguucccuugcuuccugcagcuccuggccgggcuggcgcugccugcugugcccccccagcagugggccuugucugcugggaacggcucgucagagguggaagugguacccuuccaggaaguguggggccgcagcuacugccgggcgcuggagaggcugguggacgucguguccgaguaccccagcgagguggagcacauguucagcccauccugugucucccugcugcgcugcaccggcugcugcggcgaugagaaucugcacugugugccgguggagacggccaaugucaccaugcagcuccuaaagauccguucuggggaccggcccuccuacguggagcugacguucucucagcacguucgcugcgaaugccggccucugcgggagaagaugaagccggaaaggaggagacccaagggcagggggaagaggaggagagagaagcagagacccacagacugccaccugugcggcgaugcuguuccccggagguaacccaccccuuggaggagagagaccccgcacccggcucguguauuuauuaccgucacacucuucagugacuccugcugguaccugcccucuauuuauuagccaacuguuucccugcugaaugccucgcucccuucaagacgaggggcagggaaggacaggacccucaggaauucagugccuucaacaacgugagagaaagagagaagccagccacagaccccugggagcuuccgcuuugaaagaagcaagacacguggccucgugaggggcaagcuaggccccagaggcccuggaggucuccaggggccugcagaaggaaagaagggggcccugcuaccuguucuugggccucaggcucugcacagacaagcagcccuugcuuucggagcuccuguccaaaguagggaugcggauccugcuggggccgccacggccuggcuggugggaaggccggcagcgggcggaggggauccagccacuucccccucuucuucugaagaucagaacauucagcucuggagaacagugguugccugggggcuuuugccacuccuugucccccgugaucuccccucacacuuugccauuugcuuguacugggacauuguucuuuccggccaaggugccaccacccugcccccccuaagagacacauacagagugggccccgggcuggagaaagagcugccuggaugagaaacagcucagccaguggggaugaggucaccaggggaggagccugugcgucccagcugaaggcaguggcaggggagcagguuccccaagggcccuggcacccccacaagcugucccugcagggccaucugacugccaagccagauucucuugaauaaaguauucuaguguggaaaaaaaaaaaaaaaaaaaaaaaaaaaaaa

SEQ ID NO: 2783 - RNA, 19 nt, Artificial Sequence
  Description of Artificial Sequence: Synthetic oligonucleotide
cugcugucugcggaggaaa

SEQ ID NO: 2784 - RNA, 19 nt, Artificial Sequence
  Description of Artificial Sequence: Synthetic oligonucleotide
acugcaucgacggacggcc

SEQ ID NO: 2785 - RNA, 19 nt, Artificial Sequence
  Description of Artificial Sequence: Synthetic oligonucleotide
cgcccagcuacgggaggac

SEQ ID NO: 2786 - RNA, 19 nt, Artificial Sequence
  Description of Artificial Sequence: Synthetic oligonucleotide
ccuggaguggcacugggcg

SEQ ID NO: 2787 - RNA, 19 nt, Artificial Sequence
  Description of Artificial Sequence: Synthetic oligonucleotide
gcccgacggaccauccccg

SEQ ID NO: 2788 - RNA, 19 nt, Artificial Sequence
  Description of Artificial Sequence: Synthetic oligonucleotide
gggacccgccugccccucg

SEQ ID NO: 2789 - RNA, 19 nt, Artificial Sequence
  Description of Artificial Sequence: Synthetic oligonucleotide
ggcgccccgccccgccggg

SEQ ID NO: 2790 - RNA, 19 nt, Artificial Sequence
  Description of Artificial Sequence: Synthetic oligonucleotide
gccgcuccccgucggguuc

SEQ ID NO: 2791 - RNA, 19 nt, Artificial Sequence
  Description of Artificial Sequence: Synthetic oligonucleotide
ccccagccacagccuuacc

SEQ ID NO: 2792 - RNA, 19 nt, Artificial Sequence
  Description of Artificial Sequence: Synthetic oligonucleotide
cuacgggcuccugacuccg

SEQ ID NO: 2793 - RNA, 19 nt, Artificial Sequence
  Description of Artificial Sequence: Synthetic oligonucleotide
gcaaggcuuccagaagaug

SEQ ID NO: 2794 - RNA, 19 nt, Artificial Sequence
  Description of Artificial Sequence: Synthetic oligonucleotide
gcucgaaccaccggccggg

SEQ ID NO: 2795 - RNA, 19 nt, Artificial Sequence
  Description of Artificial Sequence: Synthetic oligonucleotide
ggccucggggcagcaguga

SEQ ID NO: 2796 - RNA, 19 nt, Artificial Sequence
  Description of Artificial Sequence: Synthetic oligonucleotide
agggaggcguccagccccc

SEQ ID NO: 2797 - RNA, 19 nt, Artificial Sequence
  Description of Artificial Sequence: Synthetic oligonucleotide
ccacucagcucuucuccuc

SEQ ID NO: 2798 - RNA, 19 nt, Artificial Sequence
  Description of Artificial Sequence: Synthetic oligonucleotide
ccugugccaggggcucccc

SEQ ID NO: 2799 - RNA, 19 nt, Artificial Sequence
  Description of Artificial Sequence: Synthetic oligonucleotide
cgggggaugagcauggugg

SEQ ID NO: 2800 - RNA, 19 nt, Artificial Sequence
  Description of Artificial Sequence: Synthetic oligonucleotide
guuuucccucggagccccc

SEQ ID NO: 2801 - RNA, 19 nt, Artificial Sequence
  Description of Artificial Sequence: Synthetic oligonucleotide
cuggcucgggacgucugag

SEQ ID NO: 2802 - RNA, 19 nt, Artificial Sequence
  Description of Artificial Sequence: Synthetic oligonucleotide
gaagaugccggucaugagg

SEQ ID NO: 2803 - RNA, 19 nt, Artificial Sequence
  Description of Artificial Sequence: Synthetic oligonucleotide
gcuguucccuugcuuccug

SEQ ID NO: 2804 - RNA, 19 nt, Artificial Sequence
  Description of Artificial Sequence: Synthetic oligonucleotide
gcagcuccuggccgggcug

SEQ ID NO: 2805 - RNA, 19 nt, Artificial Sequence
  Description of Artificial Sequence: Synthetic oligonucleotide
ggcgcugccugcugugccc

SEQ ID NO: 2806 - RNA, 19 nt, Artificial Sequence
  Description of Artificial Sequence: Synthetic oligonucleotide
cccccagcagugggccuug

SEQ ID NO: 2807 - RNA, 19 nt, Artificial Sequence
  Description of Artificial Sequence: Synthetic oligonucleotide
gucugcugggaacggcucg

SEQ ID NO: 2808 - RNA, 19 nt, Artificial Sequence
  Description of Artificial Sequence: Synthetic oligonucleotide
gucagagguggaaguggua

SEQ ID NO: 2809 - RNA, 19 nt, Artificial Sequence
  Description of Artificial Sequence: Synthetic oligonucleotide
acccuuccaggaagugugg

SEQ ID NO: 2810 - RNA, 19 nt, Artificial Sequence
  Description of Artificial Sequence: Synthetic oligonucleotide
gggccgcagcuacugccgg

SEQ ID NO: 2811 - RNA, 19 nt, Artificial Sequence
  Description of Artificial Sequence: Synthetic oligonucleotide
ggcgcuggagaggcuggug

SEQ ID NO: 2812 - RNA, 19 nt, Artificial Sequence
  Description of Artificial Sequence: Synthetic oligonucleotide
ggacgucguguccgaguac

SEQ ID NO: 2813 - RNA, 19 nt, Artificial Sequence
  Description of Artificial Sequence: Synthetic oligonucleotide
ccccagcgagguggagcac

SEQ ID NO: 2814 - RNA, 19 nt, Artificial Sequence
  Description of Artificial Sequence: Synthetic oligonucleotide
cauguucagcccauccugu

SEQ ID NO: 2815 - RNA, 19 nt, Artificial Sequence
  Description of Artificial Sequence: Synthetic oligonucleotide
ugucucccugcugcgcugc

SEQ ID NO: 2816 - RNA, 19 nt, Artificial Sequence
  Description of Artificial Sequence: Synthetic oligonucleotide
caccggcugcugcggcgau

SEQ ID NO: 2817 - RNA, 19 nt, Artificial Sequence
  Description of Artificial Sequence: Synthetic oligonucleotide
ugagaaucugcacugugug

SEQ ID NO: 2818 - RNA, 19 nt, Artificial Sequence
  Description of Artificial Sequence: Synthetic oligonucleotide
gccgguggagacggccaau

SEQ ID NO: 2819 - RNA, 19 nt, Artificial Sequence
  Description of Artificial Sequence: Synthetic oligonucleotide
ugucaccaugcagcuccua

SEQ ID NO: 2820 - RNA, 19 nt, Artificial Sequence
  Description of Artificial Sequence: Synthetic oligonucleotide
aaagauccguucuggggac

SEQ ID NO: 2821 - RNA, 19 nt, Artificial Sequence
  Description of Artificial Sequence: Synthetic oligonucleotide
ccggcccuccuacguggag

SEQ ID NO: 2822 - RNA, 19 nt, Artificial Sequence
  Description of Artificial Sequence: Synthetic oligonucleotide
gcugacguucucucagcac

SEQ ID NO: 2823 - RNA, 19 nt, Artificial Sequence
  Description of Artificial Sequence: Synthetic oligonucleotide
cguucgcugcgaaugccgg

SEQ ID NO: 2824 - RNA, 19 nt, Artificial Sequence
  Description of Artificial Sequence: Synthetic oligonucleotide
gccucugcgggagaagaug

SEQ ID NO: 2825 - RNA, 19 nt, Artificial Sequence
  Description of Artificial Sequence: Synthetic oligonucleotide
gaagccggaaaggaggaga

SEQ ID NO: 2826 - RNA, 19 nt, Artificial Sequence
  Description of Artificial Sequence: Synthetic oligonucleotide
acccaagggcagggggaag

SEQ ID NO: 2827 - RNA, 19 nt, Artificial Sequence
  Description of Artificial Sequence: Synthetic oligonucleotide
gaggaggagagagaagcag

SEQ ID NO: 2828 - RNA, 19 nt, Artificial Sequence
  Description of Artificial Sequence: Synthetic oligonucleotide
gagacccacagacugccac

SEQ ID NO: 2829 - RNA, 19 nt, Artificial Sequence
  Description of Artificial Sequence: Synthetic oligonucleotide
ccugugcggcgaugcuguu

SEQ ID NO: 2830 - RNA, 19 nt, Artificial Sequence
  Description of Artificial Sequence: Synthetic oligonucleotide
uccccggagguaacccacc

SEQ ID NO: 2831 - RNA, 19 nt, Artificial Sequence
  Description of Artificial Sequence: Synthetic oligonucleotide
cccuuggaggagagagacc

SEQ ID NO: 2832 - RNA, 19 nt, Artificial Sequence
  Description of Artificial Sequence: Synthetic oligonucleotide
cccgcacccggcucgugua

SEQ ID NO: 2833 - RNA, 19 nt, Artificial Sequence
  Description of Artificial Sequence: Synthetic oligonucleotide
auuuauuaccgucacacuc

SEQ ID NO: 2834 - RNA, 19 nt, Artificial Sequence
  Description of Artificial Sequence: Synthetic oligonucleotide
cuucagugacuccugcugg

SEQ ID NO: 2835 - RNA, 19 nt, Artificial Sequence
  Description of Artificial Sequence: Synthetic oligonucleotide
guaccugcccucuauuuau

SEQ ID NO: 2836 - RNA, 19 nt, Artificial Sequence
  Description of Artificial Sequence: Synthetic oligonucleotide
uuagccaacuguuucccug

SEQ ID NO: 2837 - RNA, 19 nt, Artificial Sequence
  Description of Artificial Sequence: Synthetic oligonucleotide
gcugaaugccucgcucccu

SEQ ID NO: 2838 - RNA, 19 nt, Artificial Sequence
  Description of Artificial Sequence: Synthetic oligonucleotide
uucaagacgaggggcaggg

SEQ ID NO: 2839 - RNA, 19 nt, Artificial Sequence
  Description of Artificial Sequence: Synthetic oligonucleotide
gaaggacaggacccucagg

SEQ ID NO: 2840 - RNA, 19 nt, Artificial Sequence
  Description of Artificial Sequence: Synthetic oligonucleotide
gaauucagugccuucaaca

SEQ ID NO: 2841 - RNA, 19 nt, Artificial Sequence
  Description of Artificial Sequence: Synthetic oligonucleotide
aacgugagagaaagagaga

SEQ ID NO: 2842 - RNA, 19 nt, Artificial Sequence
  Description of Artificial Sequence: Synthetic oligonucleotide
aagccagccacagaccccu

SEQ ID NO: 2843 - RNA, 19 nt, Artificial Sequence
  Description of Artificial Sequence: Synthetic oligonucleotide
ugggagcuuccgcuuugaa

SEQ ID NO: 2844 - RNA, 19 nt, Artificial Sequence
  Description of Artificial Sequence: Synthetic oligonucleotide
aagaagcaagacacguggc

SEQ ID NO: 2845 - RNA, 19 nt, Artificial Sequence
  Description of Artificial Sequence: Synthetic oligonucleotide
ccucgugaggggcaagcua

SEQ ID NO: 2846 - RNA, 19 nt, Artificial Sequence
  Description of Artificial Sequence: Synthetic oligonucleotide
aggccccagaggcccugga

SEQ ID NO: 2847 - RNA, 19 nt, Artificial Sequence
  Description of Artificial Sequence: Synthetic oligonucleotide
aggucuccaggggccugca

SEQ ID NO: 2848 - RNA, 19 nt, Artificial Sequence
  Description of Artificial Sequence: Synthetic oligonucleotide
agaaggaaagaagggggcc

SEQ ID NO: 2849 - RNA, 19 nt, Artificial Sequence
  Description of Artificial Sequence: Synthetic oligonucleotide
ccugcuaccuguucuuggg

SEQ ID NO: 2850 - RNA, 19 nt, Artificial Sequence
  Description of Artificial Sequence: Synthetic oligonucleotide
gccucaggcucugcacaga

SEQ ID NO: 2851 - RNA, 19 nt, Artificial Sequence
  Description of Artificial Sequence: Synthetic oligonucleotide
acaagcagcccuugcuuuc

SEQ ID NO: 2852 - RNA, 19 nt, Artificial Sequence
  Description of Artificial Sequence: Synthetic oligonucleotide
cggagcuccuguccaaagu

SEQ ID NO: 2853 - RNA, 19 nt, Artificial Sequence
  Description of Artificial Sequence: Synthetic oligonucleotide
uagggaugcggauccugcu

SEQ ID NO: 2854 - RNA, 19 nt, Artificial Sequence
  Description of Artificial Sequence: Synthetic oligonucleotide
uggggccgccacggccugg

SEQ ID NO: 2855 - RNA, 19 nt, Artificial Sequence
  Description of Artificial Sequence: Synthetic oligonucleotide
gcuggugggaaggccggca

SEQ ID NO: 2856 - RNA, 19 nt, Artificial Sequence
  Description of Artificial Sequence: Synthetic oligonucleotide
agcgggcggaggggaucca

SEQ ID NO: 2857 - RNA, 19 nt, Artificial Sequence
  Description of Artificial Sequence: Synthetic oligonucleotide
agccacuucccccucuucu

SEQ ID NO: 2858 - RNA, 19 nt, Artificial Sequence
  Description of Artificial Sequence: Synthetic oligonucleotide
uucugaagaucagaacauu

SEQ ID NO: 2859 - RNA, 19 nt, Artificial Sequence
  Description of Artificial Sequence: Synthetic oligonucleotide
ucagcucuggagaacagug

SEQ ID NO: 2860 - RNA, 19 nt, Artificial Sequence
  Description of Artificial Sequence: Synthetic oligonucleotide
gguugccugggggcuuuug

SEQ ID NO: 2861 - RNA, 19 nt, Artificial Sequence
  Description of Artificial Sequence: Synthetic oligonucleotide
gccacuccuugucccccgu

SEQ ID NO: 2862 - RNA, 19 nt, Artificial Sequence
  Description of Artificial Sequence: Synthetic oligonucleotide
ugaucuccccucacacuuu

SEQ ID NO: 2863 - RNA, 19 nt, Artificial Sequence
  Description of Artificial Sequence: Synthetic oligonucleotide
ugccauuugcuuguacugg

SEQ ID NO: 2864 - RNA, 19 nt, Artificial Sequence
  Description of Artificial Sequence: Synthetic oligonucleotide
ggacauuguucuuuccggc

SEQ ID NO: 2865 - RNA, 19 nt, Artificial Sequence
  Description of Artificial Sequence: Synthetic oligonucleotide
ccaaggugccaccacccug

SEQ ID NO: 2866 - RNA, 19 nt, Artificial Sequence
  Description of Artificial Sequence: Synthetic oligonucleotide
gcccccccuaagagacaca

SEQ ID NO: 2867 - RNA, 19 nt, Artificial Sequence
  Description of Artificial Sequence: Synthetic oligonucleotide
auacagagugggccccggg

SEQ ID NO: 2868 - RNA, 19 nt, Artificial Sequence
  Description of Artificial Sequence: Synthetic oligonucleotide
gcuggagaaagagcugccu

SEQ ID NO: 2869 - RNA, 19 nt, Artificial Sequence
  Description of Artificial Sequence: Synthetic oligonucleotide
uggaugagaaacagcucag

SEQ ID NO: 2870 - RNA, 19 nt, Artificial Sequence
  Description of Artificial Sequence: Synthetic oligonucleotide
gccaguggggaugagguca

SEQ ID NO: 2871 - RNA, 19 nt, Artificial Sequence
  Description of Artificial Sequence: Synthetic oligonucleotide
accaggggaggagccugug

SEQ ID NO: 2872 - RNA, 19 nt, Artificial Sequence
  Description of Artificial Sequence: Synthetic oligonucleotide
gcgucccagcugaaggcag

SEQ ID NO: 2873 - RNA, 19 nt, Artificial Sequence
  Description of Artificial Sequence: Synthetic oligonucleotide
guggcaggggagcagguuc

SEQ ID NO: 2874 - RNA, 19 nt, Artificial Sequence
  Description of Artificial Sequence: Synthetic oligonucleotide
ccccaagggcccuggcacc

SEQ ID NO: 2875 - RNA, 19 nt, Artificial Sequence
  Description of Artificial Sequence: Synthetic oligonucleotide
ccccacaagcugucccugc

SEQ ID NO: 2876 - RNA, 19 nt, Artificial Sequence
  Description of Artificial Sequence: Synthetic oligonucleotide
cagggccaucugacugcca

SEQ ID NO: 2877 - RNA, 19 nt, Artificial Sequence
  Description of Artificial Sequence: Synthetic oligonucleotide
aagccagauucucuugaau

SEQ ID NO: 2878 - RNA, 19 nt, Artificial Sequence
  Description of Artificial Sequence: Synthetic oligonucleotide
uaaaguauucuagugugga

SEQ ID NO: 2879 - RNA, 25 nt, Artificial Sequence
  Description of Artificial Sequence: Synthetic oligonucleotide
cugcugucugcggaggaaacugcau

SEQ ID NO: 2880 - RNA, 25 nt, Artificial Sequence
  Description of Artificial Sequence: Synthetic oligonucleotide
ucgacggacggccgcccagcuacgg

SEQ ID NO: 2881 - RNA, 25 nt, Artificial Sequence
  Description of Artificial Sequence: Synthetic oligonucleotide
ggaggaccuggaguggcacugggcg

SEQ ID NO: 2882 - RNA, 25 nt, Artificial Sequence
  Description of Artificial Sequence: Synthetic oligonucleotide
gcccgacggaccauccccgggaccc

SEQ ID NO: 2883 - RNA, 25 nt, Artificial Sequence
  Description of Artificial Sequence: Synthetic oligonucleotide
cgccugccccucggcgccccgcccc

SEQ ID NO: 2884 - RNA, 25 nt, Artificial Sequence
  Description of Artificial Sequence: Synthetic oligonucleotide
cgccgggccgcuccccgucggguuc

SEQ ID NO: 2885 - RNA, 25 nt, Artificial Sequence
  Description of Artificial Sequence: Synthetic oligonucleotide
ccccagccacagccuuaccuacggg

SEQ ID NO: 2886 - RNA, 25 nt, Artificial Sequence
  Description of Artificial Sequence: Synthetic oligonucleotide
gcuccugacuccgcaaggcuuccag

SEQ ID NO: 2887 - RNA, 25 nt, Artificial Sequence
  Description of Artificial Sequence: Synthetic oligonucleotide
gaagaugcucgaaccaccggccggg

SEQ ID NO: 2888 - RNA, 25 nt, Artificial Sequence
  Description of Artificial Sequence: Synthetic oligonucleotide
ggccucggggcagcagugagggagg

SEQ ID NO: 2889 - RNA, 25 nt, Artificial Sequence
  Description of Artificial Sequence: Synthetic oligonucleotide
gcguccagccccccacucagcucuu

SEQ ID NO: 2890 - RNA, 25 nt, Artificial Sequence
  Description of Artificial Sequence: Synthetic oligonucleotide
ucuccuccugugccaggggcucccc

SEQ ID NO: 2891 - RNA, 25 nt, Artificial Sequence
  Description of Artificial Sequence: Synthetic oligonucleotide
cgggggaugagcauggugguuuucc

SEQ ID NO: 2892 - RNA, 25 nt, Artificial Sequence
  Description of Artificial Sequence: Synthetic oligonucleotide
ccucggagcccccuggcucgggacg

SEQ ID NO: 2893 - RNA, 25 nt, Artificial Sequence
  Description of Artificial Sequence: Synthetic oligonucleotide
gucugagaagaugccggucaugagg

SEQ ID NO: 2894 - RNA, 25 nt, Artificial Sequence
  Description of Artificial Sequence: Synthetic oligonucleotide
gcuguucccuugcuuccugcagcuc

SEQ ID NO: 2895 - RNA, 25 nt, Artificial Sequence
  Description of Artificial Sequence: Synthetic oligonucleotide
ccuggccgggcuggcgcugccugcu

SEQ ID NO: 2896 - RNA, 25 nt, Artificial Sequence
  Description of Artificial Sequence: Synthetic oligonucleotide
ugugcccccccagcagugggccuug

SEQ ID NO: 2897 - RNA, 25 nt, Artificial Sequence
  Description of Artificial Sequence: Synthetic oligonucleotide
gucugcugggaacggcucgucagag

SEQ ID NO: 2898 - RNA, 25 nt, Artificial Sequence
  Description of Artificial Sequence: Synthetic oligonucleotide
gguggaagugguacccuuccaggaa

SEQ ID NO: 2899 - RNA, 25 nt, Artificial Sequence
  Description of Artificial Sequence: Synthetic oligonucleotide
aguguggggccgcagcuacugccgg

SEQ ID NO: 2900 - RNA, 25 nt, Artificial Sequence
  Description of Artificial Sequence: Synthetic oligonucleotide
ggcgcuggagaggcugguggacguc

SEQ ID NO: 2901 - RNA, 25 nt, Artificial Sequence
  Description of Artificial Sequence: Synthetic oligonucleotide
cguguccgaguaccccagcgaggug

SEQ ID NO: 2902 - RNA, 25 nt, Artificial Sequence
  Description of Artificial Sequence: Synthetic oligonucleotide
ggagcacauguucagcccauccugu

SEQ ID NO: 2903 - RNA, 25 nt, Artificial Sequence
  Description of Artificial Sequence: Synthetic oligonucleotide
ugucucccugcugcgcugcaccggc

SEQ ID NO: 2904 - RNA, 25 nt, Artificial Sequence
  Description of Artificial Sequence: Synthetic oligonucleotide
cugcugcggcgaugagaaucugcac

SEQ ID NO: 2905 - RNA, 25 nt, Artificial Sequence
  Description of Artificial Sequence: Synthetic oligonucleotide
cugugugccgguggagacggccaau

SEQ ID NO: 2906 - RNA, 25 nt, Artificial Sequence
  Description of Artificial Sequence: Synthetic oligonucleotide
ugucaccaugcagcuccuaaagauc

SEQ ID NO: 2907 - RNA, 25 nt, Artificial Sequence
  Description of Artificial Sequence: Synthetic oligonucleotide
ccguucuggggaccggcccuccuac

SEQ ID NO: 2908 - RNA, 25 nt, Artificial Sequence
  Description of Artificial Sequence: Synthetic oligonucleotide
cguggagcugacguucucucagcac

SEQ ID NO: 2909 - RNA, 25 nt, Artificial Sequence
  Description of Artificial Sequence: Synthetic oligonucleotide
cguucgcugcgaaugccggccucug

SEQ ID NO: 2910 - RNA, 25 nt, Artificial Sequence
  Description of Artificial Sequence: Synthetic oligonucleotide
gcgggagaagaugaagccggaaagg

SEQ ID NO: 2911 - RNA, 25 nt, Artificial Sequence
  Description of Artificial Sequence: Synthetic oligonucleotide
gaggagacccaagggcagggggaag

SEQ ID NO: 2912 - RNA, 25 nt, Artificial Sequence
  Description of Artificial Sequence: Synthetic oligonucleotide
gaggaggagagagaagcagagaccc

SEQ ID NO: 2913 - RNA, 25 nt, Artificial Sequence
  Description of Artificial Sequence: Synthetic oligonucleotide
cacagacugccaccugugcggcgau

SEQ ID NO: 2914 - RNA, 25 nt, Artificial Sequence
  Description of Artificial Sequence: Synthetic oligonucleotide
ugcuguuccccggagguaacccacc

SEQ ID NO: 2915 - RNA, 25 nt, Artificial Sequence
  Description of Artificial Sequence: Synthetic oligonucleotide
cccuuggaggagagagaccccgcac

SEQ ID NO: 2916 - RNA, 25 nt, Artificial Sequence
  Description of Artificial Sequence: Synthetic oligonucleotide
cccggcucguguauuuauuaccguc

SEQ ID NO: 2917 - RNA, 25 nt, Artificial Sequence
  Description of Artificial Sequence: Synthetic oligonucleotide
cacacucuucagugacuccugcugg

SEQ ID NO: 2918 - RNA, 25 nt, Artificial Sequence
  Description of Artificial Sequence: Synthetic oligonucleotide
guaccugcccucuauuuauuagcca

SEQ ID NO: 2919 - RNA, 25 nt, Artificial Sequence
  Description of Artificial Sequence: Synthetic oligonucleotide
aacuguuucccugcugaaugccucg

SEQ ID NO: 2920 - RNA, 25 nt, Artificial Sequence
  Description of Artificial Sequence: Synthetic oligonucleotide
gcucccuucaagacgaggggcaggg

SEQ ID NO: 2921 - RNA, 25 nt, Artificial Sequence
  Description of Artificial Sequence: Synthetic oligonucleotide
gaaggacaggacccucaggaauuca

SEQ ID NO: 2922 - RNA, 25 nt, Artificial Sequence
  Description of Artificial Sequence: Synthetic oligonucleotide
agugccuucaacaacgugagagaaa

SEQ ID NO: 2923 - RNA, 25 nt, Artificial Sequence
  Description of Artificial Sequence: Synthetic oligonucleotide
agagagaagccagccacagaccccu

SEQ ID NO: 2924 - RNA, 25 nt, Artificial Sequence
  Description of Artificial Sequence: Synthetic oligonucleotide
ugggagcuuccgcuuugaaagaagc

SEQ ID NO: 2925 - RNA, 25 nt, Artificial Sequence
  Description of Artificial Sequence: Synthetic oligonucleotide
caagacacguggccucgugaggggc

SEQ ID NO: 2926 - RNA, 25 nt, Artificial Sequence
  Description of Artificial Sequence: Synthetic oligonucleotide
caagcuaggccccagaggcccugga

SEQ ID NO: 2927 - RNA, 25 nt, Artificial Sequence
  Description of Artificial Sequence: Synthetic oligonucleotide
aggucuccaggggccugcagaagga

SEQ ID NO: 2928 - RNA, 25 nt, Artificial Sequence
  Description of Artificial Sequence: Synthetic oligonucleotide
aaagaagggggcccugcuaccuguu

SEQ ID NO: 2929 - RNA, 25 nt, Artificial Sequence
  Description of Artificial Sequence: Synthetic oligonucleotide
ucuugggccucaggcucugcacaga

SEQ ID NO: 2930 - RNA, 25 nt, Artificial Sequence
  Description of Artificial Sequence: Synthetic oligonucleotide
acaagcagcccuugcuuucggagcu

SEQ ID NO: 2931 - RNA, 25 nt, Artificial Sequence
  Description of Artificial Sequence: Synthetic oligonucleotide
uccuguccaaaguagggaugcggau

SEQ ID NO: 2932 - RNA, 25 nt, Artificial Sequence
  Description of Artificial Sequence: Synthetic oligonucleotide
uccugcuggggccgccacggccugg

SEQ ID NO: 2933 - RNA, 25 nt, Artificial Sequence
  Description of Artificial Sequence: Synthetic oligonucleotide
gcuggugggaaggccggcagcgggc

SEQ ID NO: 2934 - RNA, 25 nt, Artificial Sequence
  Description of Artificial Sequence: Synthetic oligonucleotide
cggaggggauccagccacuuccccc

SEQ ID NO: 2935 - RNA, 25 nt, Artificial Sequence
  Description of Artificial Sequence: Synthetic oligonucleotide
cucuucuucugaagaucagaacauu

SEQ ID NO: 2936 - RNA, 25 nt, Artificial Sequence
  Description of Artificial Sequence: Synthetic oligonucleotide
ucagcucuggagaacagugguugcc

SEQ ID NO: 2937 - RNA, 25 nt, Artificial Sequence
  Description of Artificial Sequence: Synthetic oligonucleotide
cugggggcuuuugccacuccuuguc

SEQ ID NO: 2938 - RNA, 25 nt, Artificial Sequence
  Description of Artificial Sequence: Synthetic oligonucleotide
cccccgugaucuccccucacacuuu

SEQ ID NO: 2939 - RNA, 25 nt, Artificial Sequence
  Description of Artificial Sequence: Synthetic oligonucleotide
ugccauuugcuuguacugggacauu

SEQ ID NO: 2940 - RNA, 25 nt, Artificial Sequence
  Description of Artificial Sequence: Synthetic oligonucleotide
uguucuuuccggccaaggugccacc

SEQ ID NO: 2941 - RNA, 25 nt, Artificial Sequence
  Description of Artificial Sequence: Synthetic oligonucleotide
cacccugcccccccuaagagacaca

SEQ ID NO: 2942 - RNA, 25 nt, Artificial Sequence
  Description of Artificial Sequence: Synthetic oligonucleotide
auacagagugggccccgggcuggag

SEQ ID NO: 2943 - RNA, 25 nt, Artificial Sequence
  Description of Artificial Sequence: Synthetic oligonucleotide
gaaagagcugccuggaugagaaaca

SEQ ID NO: 2944 - RNA, 25 nt, Artificial Sequence
  Description of Artificial Sequence: Synthetic oligonucleotide
agcucagccaguggggaugagguca

SEQ ID NO: 2945 - RNA, 25 nt, Artificial Sequence
  Description of Artificial Sequence: Synthetic oligonucleotide
accaggggaggagccugugcguccc

SEQ ID NO: 2946 - RNA, 25 nt, Artificial Sequence
  Description of Artificial Sequence: Synthetic oligonucleotide
cagcugaaggcaguggcaggggagc

SEQ ID NO: 2947 - RNA, 25 nt, Artificial Sequence
  Description of Artificial Sequence: Synthetic oligonucleotide
cagguuccccaagggcccuggcacc

SEQ ID NO: 2948 - RNA, 25 nt, Artificial Sequence
  Description of Artificial Sequence: Synthetic oligonucleotide
ccccacaagcugucccugcagggcc

SEQ ID NO: 2949 - RNA, 25 nt, Artificial Sequence
  Description of Artificial Sequence: Synthetic oligonucleotide
caucugacugccaagccagauucuc

SEQ ID NO: 2950 - RNA, 25 nt, Artificial Sequence
  Description of Artificial Sequence: Synthetic oligonucleotide
cuugaauaaaguauucuagugugga

What is claimed is:

1. A meroduplex ribonucleic acid (mdRNA) molecule, comprising a first strand of 15 to 40 nucleotides in length that is complementary to a portion of any one of human VEGF mRNA as set forth in SEQ ID NO:1158, 1159, 1160, 1161, 1162, 1163, or 1164, human VEGFB mRNA as set forth in SEQ ID NO:2289, human VEGFC mRNA as set forth in SEQ ID NO:2398, human FIGF mRNA as set forth in SEQ ID NO:2602, or human PGF mRNA as set forth in SEQ ID NO:2806, and a second strand and a third strand that are each complementary to non-overlapping regions of the first strand, wherein the second strand and third strands can anneal with the first strand to form at least two double-stranded regions spaced apart by up to 10 nucleotides and thereby forming a gap between the second and third strands.

2. The mdRNA molecule of claim 1 wherein the first strand is 15 to 25 nucleotides in length or 26 to 40 nucleotides in length.

3. The mdRNA molecule of claim 1 wherein the gap is a nick, or the gap comprises at least one unpaired nucleotide in the first strand positioned between the double-stranded regions formed by the second and third strands when annealed to the first strand.

4. The mdRNA molecule of claim 1 wherein at least one uridine of the mdRNA molecule is a 5-methyluridine, 2-thioribothymidine, or 2′-O-methyl-5-methyuridine.

5. The mdRNA molecule of claim 1 wherein the mdRNA molecule comprises one or more locked nucleic acid (LNA) molecules, deoxy nucleotide, G clamp, 2′-sugar modification, modified internucleoside linkage, or any combination thereof.

6. The mdRNA molecule of claim 1, wherein the mdRNA contains at least one 3′-overhang comprising one to four nucleotides that are not part of the gap or wherein the mdRNA has a blunt end at one or both ends of the mdRNA.

7. The mdRNA molecule of claim 1, wherein the third strand comprises a 5′-terminal end comprising a hydroxyl or a phosphate.

8. An mdRNA molecule, comprising a first strand of 15 to 40 nucleotides in length that is complementary to any one of human VEGF mRNA as set forth in SEQ ID NO:1158, 1159, 1160, 1161, 1162, 1163, or 1164, human VEGFB mRNA as set forth in SEQ ID NO:2289, human VEGFC mRNA as set forth in SEQ ID NO:2398, human FIGF mRNA as set forth in SEQ ID NO:2602, or human PGF mRNA as set forth in SEQ ID NO:2806, and a second strand and a third strand that is each complementary to non-overlapping regions of the first strand, wherein the second strand and third strands can anneal with the first strand to form at least two double-stranded regions spaced apart by up to 10 nucleotides and thereby forming a gap between the second and third strands, and wherein at least one pyrimidine of the mdRNA comprises a pyrimidine nucleoside according to Formula I or II: [chemical structure]
wherein:
R¹ and R² are each independently a —H, —OH, —OCH₃, —OCH₂OCH₂CH₃, —OCH₂CH₂OCH₃, halogen, substituted or unsubstituted C₁-C₁₀ alkyl, alkoxy, alkoxyalkyl, hydroxyalkyl, carboxyalkyl, alkylsulfonylamino, aminoalkyl, dialkylamino, alkylaminoalkyl, dialkylaminoalkyl, haloalkyl, trifluoromethyl, cycloalkyl, (cycloalkyl)alkyl, substituted or unsubstituted C₂-C₁₀ alkenyl, substituted or unsubstituted —O-allyl, —O—CH₂CH═CH₂, —O—CH═CHCH₃, substituted or unsubstituted C₂-C₁₀ alkynyl, carbamoyl, carbamyl, carboxy, carbonylamino, substituted or unsubstituted aryl, substituted or unsubstituted aralkyl, —NH₂, —NO₂, —C≡N, or heterocyclo group,
R³ and R⁴ are each independently a hydroxyl, a protected hydroxyl, a phosphate, or an internucleoside linking group, and
R⁵ and R⁸ are each independently O or S.

9. The mdRNA molecule of claim 8 wherein the first strand is 15 to 25 nucleotides in length or 26 to 40 nucleotides in length.

10. The mdRNA molecule of claim 8 wherein the gap is a nick, or the gap comprises at least one unpaired nucleotide in the first strand positioned between the double-stranded regions formed by the second and third strands when annealed to the first strand.

11. The mdRNA molecule of claim 8 wherein at least one nucleoside is according to Formula I and in which R¹ is methyl and R² is —OH or —O-methyl.

12. The mdRNA molecule of claim 8 wherein at least one R² is selected from the group consisting of 2′-O—(C₁-C₅) alkyl, 2′-O-methyl, 2′-OCH₂OCH₂CH₃, 2′-OCH₂CH₂OCH₃, 2′-O-allyl, and 2′-fluoro.

13. The mdRNA molecule of claim 8 wherein at least one uridine of the mdRNA molecule is a 5-methyluridine, 2-thioribothymidine, or 2′-O-methyl-5-methyuridine.

14. The mdRNA molecule of claim 8, further comprising one or more locked nucleic acid (LNA) molecule, deoxy nucleotide, G clamp, 2′-sugar modification, modified internucleoside linkage, or any combination thereof.

15. The mdRNA molecule of claim 8, wherein the mdRNA contains at least one 3′-overhang comprising one to four nucleotides that is not a part of the gap or wherein the mdRNA molecule has a blunt end on one or both ends of the mdRNA molecule.

16. An mdRNA molecule, comprising a first strand that is complementary to any one of human VEGF mRNA asset for thin SEQ ID NO:1158, 1159, 1160, 1161, 1162, 1163, or 1164, human VEGFB mRNA as set forth in SEQ ID NO:2289, human VEGFC mRNA as set forth in SEQ ID NO:2398, human FIGF mRNA as set forth in SEQ ID NO:2602, or human PGF mRNA as set forth in SEQ ID NO:2806, and a second strand and a third strand that are each complementary to non-overlapping regions of the first strand, wherein the second strand and third strands can anneal with the first strand to form at least two double-stranded regions spaced apart by up to 10 nucleotides and thereby forming a gap between the second and third strands, and wherein the combined double-stranded regions total about 15 base pairs to about 40 base pairs.

17. The mdRNA molecule of claim 16 wherein the first strand is about 15 to about 25 nucleotides in length or about 26 to about 40 nucleotides in length.

18. The mdRNA molecule of claim 16 wherein the gap is a nick, the gap comprises at least one unpaired nucleotide in the first strand positioned between the double-stranded regions formed by the second and third strands when annealed to the first strand.

19. The mdRNA molecule of claim 16 wherein at least one uridine of the mdRNA molecule is a 5-methyluridine, 2-thioribothymidine, or 2′-O-methyl-5-methyuridine.

20. The mdRNA molecule of claim 1, wherein the first strand is 19 to 23 nucleotides in length and is complementary to a human VEGF nucleic acid sequence as set forth in any one of SEQ ID NOS:1165-1803, human VEGFB nucleic acid sequence as set forth in any one of SEQ ID NOS:2290-2351, human VEGFC nucleic acid sequence as set forth in any one of SEQ ID NOS:2399-2514, human FIGF nucleic acid sequence as set forth in any one of SEQ ID NOS:2603-2718, or human PGF nucleic acid sequence as set forth in any one of SEQ ID NOS:2807-2902.

21. The mdRNA molecule of claim 1, wherein the first strand is 25 to 29 nucleotides in length and is complementary to a human VEGF nucleic acid sequence as set forth in any one of SEQ ID NOS:277 or 1804-2288, human VEGFB nucleic acid sequence as set forth in any one of SEQ ID NOS:2352-2397, human VEGFC nucleic acid sequence as set forth in any one of SEQ ID NOS:2515-2601, human FIGF nucleic acid sequence as set forth in any one of SEQ ID NOS:2719-2805, or human PGF nucleic acid sequence as set forth in any one of SEQ ID NOS:2903-2974.

22. A method for reducing the expression of a human VEGF gene, comprising administering an mdRNA molecule according claim 1 to a cell expressing a VEGF, VEGFB, VEGFC, FIGF, or PGF gene, wherein the mdRNA molecule reduces expression of the VEGF, VEGFB, VEGFC, FIGF, or PGF gene, respectively, in the cell.

23. The method according to claim 22 wherein the cell is human.
